United States Patent Application Publication US 2025/0051766 A1 - sequence listing, part 20

SEQ ID NO: 5065 - DNA, 58617616 bp, Homo sapiens (residues 39,078,415-41,249,437 of 58,617,616)
  source 1..58617616: mol_type = genomic DNA
tataacaagtgctgtttttaccacaggtcttagttcattacatccattcattcactcatctaattctcacaactctctaaaatacgtcaaatatacagcatggtttattatccccattttgcagatgtggaaattgaggcacagagaggcaaatggctcacagctactcaatgctggagctgggtttaaacgcaagctgtctgtctccaaagccctggcttttttccatggatggcatctctcagattgggtaaagtaaaccacacaatggaatattatgagccagtatcaaagaatgcttagaagagtccagtaaaaataacgtcagactgtggtatgaccgtgattcagcccaattcctgtgtacaagaaaaaatgctccaagcattctcaatggccactgagtgattgaatgaaatcttttgtaaataattgtggctattatctatggagctctttcttgatcagccccaccccgtgttacacgttttacttgctgtatctttccaagcatttgcaaagtaggcactgttgtatcagttttagatattaggtcactgaggctaacacaagagcagacactcacccaaggttacccagtcacaaagtggcagaaccagaattcaaacccaggtttgtggctatgcacagtgactcacgcctataatcccagcattttgggaggctgaggtgggaggattgcttgaggacaggagtttgaggtcacagtgagctatgattgcatgattacaccaatgcactccagcctgggtgacagagtgagaccctgtctccaaaaacaaaaacaaaacccaggtttgttagttccttgagccatgaaacctccctggctctttctaagttttcagtaatgagatgtgaatattttcttttttctttttattttttgagacggagtctgactctgtcgcccaggctggagtgcaatagtgtgatctcagctcactgcaatctccgcctcccgggttcaagcgattctcctgcctcagcctcctgagtagctaggattacaggcgctcactaccatgcctggcaaatttttgtatttttggtagagatggggtttcaccacgttggccaggctggtctcgaactcctgcccccgtgatctgcccaccttggcctcccaaagtgctgggattacaggctggccaatgatgctactattttcataatggagaaatagtttttaaagaagtctccttaagaaagtagactcatttatttttattttattagctatgtgcattactttgataaaatttaaaaccctaacttacaccgtacacaaaaatcagttccagatagattgccaacctaagggtaactcacatgagaaagctattggaaaataacagaagaggccagatgcggtggctcactcctgtaatgccaacagtttgggaggtcaaagcaggaggatcacttgagtccaggagttcaagaccagcctggggaatatggcaagaccttgtccctacaaaaaaattaacaaaattagctgggcgtggtgcacgcacctgtaatcccagcactttgggaggtcgaggcgggtggatcacctgaggtcaggggttcgagaccagcctggccaacatggtgaaacccccgtctctgcctaaaatacaaaaattagccgggcatggtggcaggcgcctgtaatcacagctactcgggaggctgaggcagaatagcctgaacccgggaggcagaggttgcagtgagccgagatcatgccattgcactccagcctgggcaacagagtgagactctgtctcaaataaataaataaataaaaatagaaataaacaaaattagccaggcatggtggtggtgcatgcctgtggtcccagctactgggaggctgaggtgggaggattgcttgagccagggaggtagaggctgcagtgagctatgatgccactgcactacagcctaggtgacagagcaagaccctttatctaaaaaataaaataaaataaaaataaataaaccaataaaaatggacaacccagtagaaaaccggacaagacacttgaacaagcacatcacaaaaaggatatccaaaaggctgatatgcaaatgaagagatgttcaatttcattactcagcagggaaatgcaaattaaagctacaatgagctacctctacacacccaccagaatgactaaaaataaagcacctgacaatgctttattggttccaagtgttggcagcgatgtggaacaatggaagtgttctaacgtggctggtgggaggagaagaaataccactttggaaacctctttggctgtatctaccaaagataaagatacatgcaccttatgacccagccatcttatacttctagtttacatccaagagaaatgtgtatatatgtttaacaaaatatgtactagaatgttgatcacagcactatttgcaaaagccgaaaaaaaaggaagtaactcaaaattccattgacaattggttttgatagataaaccaactgataaataaattgataaataaaccactgatggctgggcacggtggctcacgcctgtaatcccagcactttgggaggctgaggcaggcggatcacctgaggtcgggagttcgaaatcagcctggccaacatggtgaaaccttatctctactaaaaaatacaaaattagctaggtgtggtggtgcatgcctgtgatcccagctactcaggaggctgaggcaggagaatcgcttgaacctgggaggcggaggttgcagtgagccaagatcaccccattgcactccagcctgggcaacaagaacgaaactccgtctcaaaagaacaaaacaaaaacaaaaacaaacaaacaaaaaaccaccagtgatacataaattggggtgtattcacacagtggagggctgcttggcaatgagaaagaaaatgggttgcaattatgcgcccaactcagatacatttcccaatcataaagttgagtgaaagagttaaacctgtatatttctatttacgccatgtgcaaaaataggcaaaatgaaaccactgtgtgtagggaggtgtacttaggtggggaaaccaaagtcaggtaaaagttaagtggatttcttcatgggaaggaagaaagctgtgctggagaggaagcaggagggggcttgggggaaggcgataagattatttttcttgcacccggttggtggttacacagttgtgttcactttgtcatatttattcagtgggacatttatgtctcattacttttctgcatgtatatcacatttcataatttaaaaggtttaaattgactgggcacagcagctcacacctgtaatcccggcactttgggaggccgaggtgggcagatcacttgagtctaggagttcgagaccagcctggccaacacagtgaaaccccgtctctactaaaaatacaaggccgggcgcggtggctcacgcctgcagtcccagcactttgggaggccgaggcgggcggatcacgccgtcagaagatcaagaccatcctggctaacaaggtgaaaccctgtctctactaaaaatacaaaaaattagctgggtgtggcggcacgtgcctgtagtcccagctacttgggaggctgaggcaggagaatggctagaacccgggaggtggagtttgcggtgagccgagatcacaccactgcactccagcctgggggacagagtaaagtgacttagaaaactaggcttattaaaactctgccttacaaactgggcagactagatgtcttggtaataattagaagattattatcaataatcttctaattattataatgataattagaagattatacgggggcacttgctctgtgctaggcactgttctaaggggtttattatttaatccttgcaacaaccctataaggtgctactattgttcccatttcacagatggggaaaccgaggcaccgtgcggttaaatcacttgtctaagttagtcagtgctgaagatagatttataaccaggccatctagccccagagtcgatgctccattccccaccgcaagcttatacctgagctataagccctcatccgccagtcagggtccaaccagaggcaactccagtgggctcttttcacctgggctggtggttgggaattcaggagctacgtgaacttggataggggaaactttttttacctctccttttactacactttaatctagcagttctcaaaatgtggtctgggggcacctgtgggtccgcaagacctttctcaggggctagtgaggtcaaaagtattttcataatgatattaagacgtttgtccttttcattctccagagactacctgacctgtgataatgtcatcactctgatggctaatagaaatatatgcatgtatattcgtgtgtttttaaaacttctcgttttcagccaggttcatgcctgtagtcccagctactcgggaggctgaggctcgaaaatcgcatgaacccaggaggcagaggttgtaatgagccaagatcgtgttactgtgctccagcctgggcaacagagtgaaactctgtctcaaaacaaaaacaaaacacacacacacacaaaaccaaaaaacaaacacaaaaacaaaacaacaacaacaaaaaaaccccccaacaccttgtatcacaatagcactggtttcctttgtatttctgtgtatttatattatgcatgtaacgacatgatcctgagaagggcttgaccagcttgccataggcatctttagcacaaaaaagcttaggaacctcccattctggacgaactaagaatacggggaggttataattgggggccacaggagtggcaggtactcaagtttggttatgagagctactttcattatattttaggctgtaatggagactctggaagtgggaagaaaaaaaaaaaaactcaaacagtgcaaagggctcgttttgattttcccacactcctagtgccaatttctgaaattggtgtccacaatcagtagaagcctatgtgctctgaatttacaaagccaagtggtggcgggtcattgtatctgcagtcaggaaggggaaacgactggaaatccgggcccccccagttcttccctgcttctctttttgtggcagccgctcctcacgttcaaacagattgcaaaggtttacaggggagaaccctaacttgttccctagacgtcagtttctggagttcctgcattaatacgattaaaaagaacagctgattcttatccagcccttactctgggccgggccctgttatcggcatgaaatttcatgcagcaactcgtttactcctcacaacagcccacggggtatatacgagcatcacctcctttttacaggtgaaaaaacccaaggtccagcgaggttgaataactcacctaggtcgcacagctcagaaagcccactgcaattccgggattctggttttgttttgaggttgccccgggcttctgaggaggggtcagtgggctcagcatggaaaggaaggaagccggaaggctggaggaagatgcagcgaggctggaaaggttggggatcccccggtcctgcacacctgggtacctggggatcgggcagggccaggataggggccggtgtccgtgccctggggctccccagctgatgagtgggcgcctgagggacgagcgcagggttacctgcctgggctctcacctggtggccggctcagaggtggcgcgccggagacgtatcataaccttcctgggtcccccttcccgcgccacgccctggtggggtgggcgggtgggtgtggggcgcccaggcaggaccggccggacctgtgggacccggggccctggctgtctagggaggctgtcaccccgaggcgaccggctcttccggggctgggacggctgtaggcggcaagaggcctcggcacccgcgaactcataaataccggggcggcgctggtggcgggagaggcgcgtgcgggcagccggcgcccccgagggtgagccggggtccgggagggcgtcccctttcccggatggtcccgacccggctccatcctggcagctggagacggagctggagcaggcgggaaagcgctggagagaaggggggtgggtacagatgggggaagggcagggacgctggggatggggagagaggatgcggccgctctggccatgatgggctctaaaggatctgggggtggtgtgggaggattggggtcactaggagcaaaatagaaggctaaggatggagtagggaggcgaggtcccgggggcaggcgggaatgcttggaatctcgggagtaggtaggagaactggggtttctaacagcaggatggaaagctggggatggggctgcggaatgcaacctcctacacagcctccaccccgctcccagacccccagcactgagagtgagctctggttaggagcaaggctctggaatcaggccctcctgggttcaaatcctggctccatcccatcctagctgtgcagctgaatcactcagctgctcggtttcctcatctgtgatatggggatgacaatgctcacagccaccacttcatagcaatgtcgtgaggcttccgtgaattaatctatgtcaagcggttggcacactgtgagtgaggctcagagagctctgctgctgttccttagcgattcttatttttggtttctctctccagcacctggataaccacccatcttgaaggagacctccctgccctgcctctgttgtcccccagagcactgcctgatcatcctctgttccccatcctcccagcccttcctgctgtacctgtggggagctgatctcctcagtccccctgcttttccccggtctgccatcaccaccccaccaccatgcacccccttcctggctactggtcctgttactgtctactcctgctattctccttgggagtccaggggtccctgggggctcccagcgctgccccagagcaagtccatctgtcttacccaggtaagtgtccctgactcatttctatgcctctaccagagaggcccagcggtgcttcgttgtttgagggctcaggaatcccacactgtgagcccctaggcgggtggctcattcctcctgagcctccatcatccacctctgtggaataggaagtacaggctgtggaacacctggaagtgtggggaatgatcatggtgctcagcccacagagagtgctcccctgctctcaaaaggggaccgctgctgtccttgttcattgcatctctgttgtgtttccgggacctggcacgtttgttcgttcatgcacggtaggcctcagagccagttgtggaaggaaccagtggatgaatgataacagagctgggttacccagccccttctccatccctcttctcctcttccccacgaggctgactgcctcccgatctttgattaggatccttccactgtgggagtaagagcttggactctggaccattggcacccagaccacgtgggttagaatcccagctttgctatgtacctgctgcctaatcttgggcaagtggcttaacctctctgtcctcagtctcctcatctggataatggggtaatattagtacaacctcatggtgaggtgtaaatgagttgctacctgtaaaggggcagaactgaggctgagtgtgggggctcacacctgtagtcttagcagtttgggaggctgaggcggaaggatcacttgagctcatgagtttgggaccagcctaggaaacatagtgagacctctgcctcttagggaaaaagaaaaaatcttagacaggtgtggtggcatgcacctatagtcccagctacttgggagactgaggtgggaggatcgcttgagcccaggagttcaaggctgcagtgagccatgattggccactacactccagcctgggcaacagagagagaccctgtctttaaaaaaaaaaatgtggaggaggccaggcacagtggtgcatgcctgtaatctcagcaatttgggacactgaggtgggtggatcacttgacctcaggggttcaagaccagcctgggtaacatgggtgaaacccggtctctacaaaaaaattaaaaaattagctgggcatggtggctcacgcctggtctcagctgcttggggagctgaggcaagaggatcgcttgagcccaggaggcaaaggttgcaatgagccaagatcatgccattacactccaacctggctgacagaatgaggccctgtctcaaaaaaaaaaaaggggggggggagggggatagaacggagcttggcatgtagcagcaatttccatacactttaaatctcaggactgtttgttttaaactgttaatctcaggaccattttacatcactaaattttatggagaactaaaatttatggagaagttcaaagagctttagtttatgtgcattacagctagcaatatttactaaataaggtattaaaactgaggcatttaaaattttttattgtcatttaaaattaacaataacaaacaccttcagtattaatgtatatgatatttttaaggaacaaactgtattttgcaaaagaagaaattgagtgaggaaagtggcattgacttgcatcttttaaaaatcttttatttatttatttatttttgagacagggtctcgctctgtcaaccaggctggagtgcagtggcacagtcttggctcactgcagcctctgccccgcagggttcaagtgattctcccacctcagcctcccgagtagctgggattacaggcacccaccaccccatacttggctaatttttgtattttttatacagatggaatttcaccatgttgcccaggctggtcttgaattcctaagctcaagcgatcctccagtctcggcctcccaaagtgctgggattacagacatgagccaccgcgccccgcctaaaatctctttagtatctggtttggtaactgacaactggattctcctcagatctgttttcattttagtctgttgtgatttgttgttttggattttgcctgtgaagaaaatctgttcttgcacagacatgtggttgaaacagggagaaaagttgcttgttttttgacacagggtttggctctgtcagggtttggcactggagtgcagtagcacaaacatggctcactgcaacctcaactccgagactcaagcgatcctcccacctcagtctcttgaatagctgggaccacaggggcatgacaccatgcccagctaattttgtttttttttttttttttttgagatggagcctcactctgttggccaggctgtagtgcaatggcatgatcttggctcactgcaagctccacctcctggtttcaagcgattctcctgcttcagcctcccaagtatctgggattacaggcatgcaccaccacacctggctaatttttgtatttttagtagagacggggtttcaccatgttggccaggctggcctcgaactcctgacctcaagtgatccacccacctctgcctcccaaaatgctgggattacaggcgtgagccaccgtgcctggctctagtcctactcttttctatctgtgccagttcctcagtcattccttatctttccttgtttttcatgtcttttacatcttcaaagaagatagtttcttctttttttttagatagggtctcactctgtcacccacgctggaatgcaatggcgcaatcatagcttactgcagcctctaacttctgggcacaagtgatcctcctgactcagcctcctgagtagctgggactacagacgtgcactaccatgcctggctaattctttttattttttgtagagacaaggtctcactatgttgtccaggctggtctcaaactcctgggctcaagtgatcctcccacctcagcaccccaaagtgctgggatgacaggggtgagccaccatgcccagcagagagagggtttcttaaaggttagttgcaatgtggaatcagaaaccacatgaatgaactggcttggcatttgccagcctagtgaccttggacaaagcgctttgcctggaggcctctgtaaaaatgggaaaggcagtaaaaacccatctcgtagtgctgctgtgacaatccagtgagatcatggctgtcctttttcagcctacacagtaacaatggcaaatacactcttataagtgctttagacggataactcatttaacctggtatcaaccttaagctgtaggtaccattgctactcccatttgacaagagagactcacagcaggggaagagtctgaccccagttcacacagcctgggaatctgaatgccggcaggctagctcagaagcccacgatctttgtgggtttgtttgtttgtttgtttgtttgtttgtttgttttgagacagagtctcactccgtcgcccaggctggagtgcagtggtgtggtcttggttcactgcaacctctgcctctcaggttcaagggattctcctgcctcagcctcccgagtagctgggactaccagcgcgcatcaccatgcctggctgatttttgtatttgtatttttgcatttttttttttttgagtcgtagtctcactctgttgcccaggctagagtgtagtggtgagatcttggctcactgcaacctctgcctcccaggttcaagcgattctcctgcctcagtctctcaagtagcttggactacaggtgcatgccaccacacccagctaatttttgtattttagtagggacggggtttcaccgtgttgcccaggctggtctcgaactcctgacctcaagtaatctacccacctcggcctcccaaagtgctgggattacaggcatgagccactgtacccggcccctaatttttgtatttttcagtagagatggggtttcaccatgttgggcaggttgatcttgaactcctggcctcaagtgatccacccgcctcggcctcccaaactgctgggattacaggtgtgagccaccatgcccggcctattttaaaacttttaaattttgtactacttttggatttagcagaaacattccaaaaatattacagagttcctgtctcccctcactcagtttcccctgatgttaacattttacgtaaccatgaacaatgattaaaactgagaaatcaagattggtacaatcctgttaactaaactacagatctcatttgaatttcacccgtttttctactaatgtccatttccccttccagaatccgatccaggatctcacattgcatttagctgttgtgcctccctagtctcctcccatctattagtttctcagtcttcccttgtctttcatgctcttggtattgccgagtaccgatcagctattttgtacagtatctctcgtttgggatttgtctgatactttctcaccactggaattaagttatgtatttttggcaagactatcatagatatgatgttgtgcccttcttggcgcatgatacgaagaatcaagatgtggctgtgacttattgctgtgacttattgatgttgaccctgattgtttcattaaggaggtgcctgctgggtttctccactataaagtaattattcttccctttgtagttaataaatatcttgagggagatggctcaagacaatgcaaatcccatttctcctcaatgtttgctcactaattttagcatcttgttaaaagatcctgctgataagtggatcttatcggcaacaattagtgtggtatttgcctaatggtgattttctaattttctaatgccctccttctttttttttctttttaaattttataacctttgttttgttttgtttttgagacggagtcttgctctgttgcccaagctggagtgcagtggcgcaatctcggctcactggaacctccacctcccaggttcaagcaattcttctgcctcagcctcctgagtagcggggattacaggcgcacgctgccatgcctggccaagtttttgtaatttagtagagacggggtttcactgtgttgcccaggctggtcttgaattcctgagctcaggcaatctgcctgcctcatcctcccaaagtgctaggattacaggcatgagccactgtgcccggccaataacttttaattaattaattaattaattttgagacagagtcttgctctgtcacccaggctggattgcagtggcgcgatctcagctcattgcaacccctacctcccgggctcaagtgaccctcatcacttctgcctcttgagtagctgggactacagggatgcaccactatgcctggcaatttttgtatttttgtagagacagagtttcaccatgttgcccaggctggtctggaactcctgggctcaagcaatccacctgcctcagcctcccaaagtgttgggattatagatgtgaactactcgcccagccttcccacttctttttttttttttttttggtctattgttcctattcaatatagtagctccttccatctaattgaaattttattataagaaagagctgtccctccctgctccctttattactttattcaatgatttatttacatcatggactcatggatatccattttattccatgggtgaaaaatctgatgttatgattgtcccagatttggtctctcagaattccttcagattgcgttctgtgttcttacaacaagcctccatcatttgtgagcacttcctcacttgatgacatcacaaatgattccaggctcctcttgtgtatttcctgttccatcctgggaagcacctatttcccacaataagttccagtttcttttctttctttttttttttttttgagatggaattttgctcttgtcacccaggctggagtacagtggcgtgatctcagctcacagcaacctccgcctcctgggttcaagcgattctcctgcctcagcctcccaagtagctgggactacaggcgtgcaccaccaagcccagctgatttttgtatttttagtagagacggggtttcaccatgccggtcaggctggtctcgaactcctgacctcatgatctgcctgcctcagcctcccaaagtgctgggattacaggcatgagccactgtgcccagccctccagttcctttttattggagtatttagaaactaagatctgggcactaggtgtgctcattgccactgggatgtcattgcttctagttcctctcaacaaacacagcgaggcaatacatgcatgtacacgaagctgcatattcacacatctatgtttgaatctgtataaaaattaattacctggttggccacagtggctcagcactttgggaggctgaggtgggtggatcacttgaggtcaggagttcaagaccagcctggccaacatagtgaaaccccatctctaccaaaactacaaaaaattagccaggcgtggtggtgtgtgcctgtaatcccagctactcaggaggctggggcaggagaatcacttgaacctgggaggcggaggttgcagtgaaccaagatcacaccactgtccctccagcctgggtaacagagcaagacaacaactaaaaaaataaaaaaataaaaaaattgaattaccatgagatcatactgatatccctgatttcagcccagcaccatgggtttattttagccttatctttccttatttgtaacttctttctctaacactcagaaacttcactctgtctacgatatatttatttgtttaatcctagtgtatacataaagcatgcggtggctcacacctgtaatctcagcactttgggaggcagaggcaggtggatcacctgaggtcaggagttcaagaccagcttggccaacatggtaaaacccggtctctactaaaaatacaaaaaattagccatgtgtgttggcagatgcctgtaatcccagctactttggaggctgaggcagaagaatcgcttcaacccgggaggcagaggttgcagtgagccgaaattgtgctattgcactccagccttggcaacaagtgcgaaactctgtatatatatatatatatatatatagcagttgcagaatcatttacaggtgtgcctgtgggaagcacacgatgccaaggtgacagcctttatgcacagtcctttttgtcttttgtcttgtaataatacccagttaggacactgtttcttgcggttattattcttcctcacccccttccatgtggttatgttatgcttttttttaatctggttaggtccacttattagtgtttctattccatattgggttccccccacaccctgatagttttaattatttattttgtgggtgtgtgagggaaatgtgaaacatgactatagttccaggagtcaaaattatacgaaaagcctgactcagaccagtgtctctgtttcttcatccctactactctttcccattcctcttttttttttttttttttttttttgagatggagtctcgctctgtcacccaggctggagtgctgtggtgtgatctcggctcactgcaaccttcgcctcccagattcaagcgattctcctgtctcagcctcctgagtagctgggactacaggtgtgtgccactacacccagctaatttttgtagttttggtagagatggggtttcactatgttggccaggttggtcttgaacttctgacctcaggtgatccacctgccttggcctcccaaagtgctgggattacaggcgtgagccaccgcgcctggcccccgtttctttcttttctttctttttttctttttctttctttctttctttccttcttccctcactcctttctttctttctctttctttctttctctccttccttccttccttctttctttgtttctttctttctctccctctctctctctttctctctctctctctttctttctttctctttctttttttcgagacggggtcttgctctgtcacccaggctggagtgcagtgagtggcacaatctcagctcactgcaacctccgcctcctgggttcaagtgattctcctgcctcagcctcctgagtagctggattacaggcacgcgccaccctgcccagctaatttttatagttttagtagagaccgggttttgccatatgggccaggctggtctcgaactcctgacctcaagtgacccaccttcctgagcctcccaaagtgctgggattgcaggcatgagccatcgcgcccagctaatttttgcatttttagtagagatggggtttcaccatgttggccaggctggtctcaaactcctggcctcaaagtgatctacccaccttggcctcccaaagtgctgggattacaggctgagccaccatgtctggcctcctcttttcttctacctcattttccactcatcccctgtaagtaattcatctctttagtacctggtgtaccctttctttatttcttttgtacaaatgaacagagacacctgcatattttctatacccccttacattaagggcagctaactatactcttatgcactttgctttttttggtttaacaatatgtcctggaaacatttcatagcagttcttggaacttgtcctcattcttttttacaccattgtgtggatgttattgagtcactctcctaaatatgggcatttaggttgtttcccgtattttgcaattacaaagagtactgccataaataaccctgagcacatgcatttttgtatggctggaggaagaactcttaacattacactacaccacacggtatttttaaaaccttgacttgggtgctaacgtttaagaatttgaagctatcacttcaaaatctggattttcgtatctatctgtatatgctcctgggatataaaaaccactgtgtaaagatatgttgtaggctgggcgtggtggctcacccaaagtgctgatcccagcactttgggaggcccaggtgggtggatcatgaggtcaggagttcgaggctagcctggccaacacggtgaaaccctgtctctactaaaaatacaaaaattagccgggcatggtggcacgcacctgtaatcccagctactcaggaggctgaggcaggagaatcacttcaacccaggaggtggaggttgcagtgagccaagattgcatcactacactccagcttgggcgacagagtgagacttagtctcaaaaaaaaaaaaaaagatgtgttctagaagtcaatagaaaagccgggcacatgttcacgcctgtaatcccagcactttgggagaccgaggagggagggttgctcaagtccaggagttcaagaccagcctgggcaacatggcaagatcccatctctatgaaaaaaaaaattaaaaatcaactgggcatgctggttcatgcctgtggtccgagctactcaggaggctgaggcgggaggatcacttgaacccaggaggcagggtatattagttttgatgctgttgataaagacatacctgagactgagaagaaaaacaggtttaattggacttacagttccacatggctggggaggcctgagaatcatgacaggaggtgaaaggcacttcttacatggtggtggcaagagaaaatgaggaaaagcagaagcagaaatccttgataaaaccctcagatctcatgagacttattcactaccacaagaactgcccccatgattcaaatgatctccctccacgtacctctcacaacatgtgggaattatgggtgtacaattcaagatgagatttgggtggggacacagagccaaaccatatcattttgcctctggcccctccaaatctcatgtcctcacatttcaaaaccaatcatgccttcccaacagtctcccaaggtcttaactcatttcagcattaacccaaaagtccacagtccaaagtctcatctgaggcaagtcaagacccttccacctatgagcctgtaaaatcaaaagcaagctagttacttcctagatacaatgggggtacaggtattgggtaaatacagccattccaaatgggagaaattggctaaaacaaaggcattacagggcccatgcaagtccaaaatccagcagggcagtcaaattttaaagctccaaaatgatttcctttgacttcaggcctcacatgcaggtctcactgatgcaagaggtgggttcccatggttgtgggcagctctgcccctgtggctttgcagggtatagcctccctcctggctgctttcacaggctggcattgagtttctgcagcttttccaggaacacagtgcaagctgttggtggatctacaattctggagtctggaggacagtggccctcttttcacagctccactaggtggtaacccagtagggactctgtgtgggggctccagccccacatttcccttctgcactgccctagcagaggttctccatgagagccccacccctacttctgcctgggcattcaggcgtttccatacatcttctgaaatctaggcagaggttcccaaaccccaattcttgacttctgcgcacctgcaggctcaaaaccatgtggaagctgccaaggcttggggattgcaccctctgaagccacggcccaagctctatgttgtccccttacagccacagctggagcagctagaatgcaagacaccaagtccctagactgcacacagcacagggaccctgggccctgcccatgaaaccattttttcctcctagacctctgggtctgagatgggaggggctgccgcaaaggtctctgacatgccctggagatattttccccattgtcttggggatgaacgttcatctcctcgttacttatgcaaatatctgcagccagtttgaatttctcctcagaaaatggggttttattttctatcccatcatcaggctgcaaattttctgaacttttatgctctgcttcccttttaaaactgaatgcctttaacaggacatcttgaatgctttgctgcttagaaatttcttccaccagataccctaaatcatctctctcaagttcaaagttccaataatctccagggcaggggcaaaatccaccagtctctttgctaaaagataacaagagtcacctttgctccagttcccaacaagttcctcatctccacctgagagcacctctgcctggatttcattgtccatatcattatcagtatttttgtcaaagccattcaacaagtctctaggaagttccaaattttcccacattttcctgtcttcttctgagccctctaaactttccgacctctgtctgttacccagttccaaagctgcttccacattttcaggtatcttttcagcaacaccccactctactggtaccagcttactatattagtccattttcatgctgctgataaagacatacccaagactgggaagaaaaagaggtttaattggacttacagttccatatggctggggaggcctcagaatcatggcagaaggtgaaagccatttcttttttctttctttctttctttttttgagacagacagagtcttgctctgttgccaggctggaatgcagtggcgtgctcttggctcacggcaacctccatctcccgggttcaagtgattctcctgcctcagccttccaagtagctgggactacaggcacatgccaccacgcccagctaatttttgtatttttagtagagatggggtttcaccatgttggccaggatggtctcgatctcctgacctcgtgatctgcccaccttggcctcccaaagtgctgggtttacaggcatgagccaatacacctggctagtgaaaagcatttctgacatggcggtggcaagagaaaatgagaaagaagcaaaagtggaaacccctgataaactcatcagatctcgtgagacttattcactaccatgagaacagtatgggggaaaccaccaccttgattcagtctcccactggtccctcccacaacacgtggggattacgggagtacaattcaagatgagatttgggtggggacacagagccaaaccatctcaccgaggttgcagtgagccgagaatgcgccattgcactccagcctaggcaacagggcaagactcctcaaaaaaaaaaaaaaattagctgggcatggtgacatgtgcctgtggtcccagctacttgggaggctgaggcaggaggatcgcttgagcccaggaggccaaggctgcagtgagctaagatggcaccactgcacctccagcctgggcaatagagtgagaccctatctctaagaaaaaaaaaaaaaaagtcaatagctttgctggtactgggcccgtttcctgcttgctttgtggctattgccagatctgagtgatggctgcccctttgagatagggcagggtctacagtcttggcctccagacacccaagctggcaacccttaaatgatatcatgtgtgtacaatagttggcacaagacctgcacacagtaaataatgatattaataataatactcattcccgcatataaccctaagtgtactaggtactgtttcacgtgctttatttatatttattcatctaagcctcataacaaccatatagggcagagactattatttttccattttacagacaggaaaactgaggctcagagaggtgaagtgatgtgccccaggaaagctcagcttagaaatggcagagctggctcatgcctgtaatcccagaactttgggaggccaaggtgggtggatcacctgaggtcagtagttcaagaccagcctggccaacatggcaaaactacatctctactaaaaatgcaaaaattagccaggcatggtggcacatgcttgtaatcccagctactcgggaggctgaggcaggagaatcgcttgaacctgcgaggcggcagagattgcagtaagctgagattgcaccactgtactccagcctaggaggcagagtaagaccctgactcaaaaaaaaaaaaaaaaaaaaaaaaaagaaaagaaaagaaaagaaaagaaatggcggggctgggattgaacttgggcagttccagaacctgtgtccttaaccactaactgttcaacagtggtcaacgcccctcactttttctgcatatccctcccaccctgcccaggcttcactcccggtctaccctctgtccctttctccccaggtgagccaggctccatgactgtaacttggaccacatgggtcccaacccgctctgaagtgcaattcgggttgcagccgtcggggcccctgcccctccgcgcccagggcaccttcgtcccctttgtggacgggggcattctccggcggaagctctacatacaccgagtcacgcttcgcaagctgctgccaggggttcagtatggtgagaggggccccaggctgagctgttgaggaggagtgggaagaggagtgggatgcagactagaagctaccactggccggtggctcaggctgggctggtaactccactgcctatctgcaagcctgttgtatgagaccccaggatgaaaacggaaggtgccggggaaggcagaccgaaggggcatgggccagcccccaccagtccccccatctcctcccctccaccagtcggggaaggatggggttggagggagggtcccggggcgccccagctgactgcgaccttttcctctcccattcagtttatcgctgtggcagtgcgcagggctggagccgtcggttccgcttcagggccctcaagaatggggcccactggagtccccgtctggctgtgtttggagacctgggggctgacaacccgaaggccgtcccccggctgcgcagggacacccagcagggcatgtatgacgccgttctccatgtgggtgaggcatccgcaggggcgcgcgcagggacggtggggggcgcgcgcagggatggtggggggcgcgcgggtcgggggcgcgcgggtcgggggcggtgctaggaccgtggaggggacagggctggggccagtgtgtctctgaagggacaggggatgagactggctacggagacggtgtctgtggccaaccagcctgcctaggttaaaatcccaactctggcgctcttgccaggagcaggggttttcccccgtatattttgattagagagaaagctggttccgagttcgcaggactgttgtgatgactacgttagttcgctttgcctcgcagggtgcaggtgcacttcggtgtccttgtgctggttattattattattgctgctgttgttatttaagagggggaagggaattagatgggtaatggggattggggattgtgtgcttcaaagtgcagactctggaatcaggctccctaggttttatttctacatcttcactagccagctgtgtgacctggggcctcagtttccccatctgaaatgggaataataataataatactcatcttgggccaggcgcagtggctcatgcctgtaattccagcactttgtgaggccaaggtgggtggatcacttgaggtcaggagttcgagaccagcccagccaacatggtgaaactccatctctactaaaactacaaaaattagccaggtgtggtggcaagtgtctgtaatcccagctgcttgggaggctgaggcaggagaaccgcttgaacccaggaggcagaggttgcagtgagccaagatggcaccactgcagtccagcctgggcagcagagggagactctgtctcaaaaaaaaaaaaaaaaaaaaaaagtgcccatcttggcccggcacagtggctcacacctgtaattccagcactttgggaagctggttttgaattcctgggctcaagtgatactcttgccttggcctcccgaagcgctgggattaacaggtgtgagtcaccatacctggctctctcaattccagtgaaagcagagctgggcctgggtcctcaccctccttccgccccctcccccaggagactttgcctacaacctggatcaggacaacgcccgtgttggggataggttcatgcggctcattgaacccgtggctgccagcctgccgtacatgacatgccctgggaatcatgaagaacgctagtgaggactgagggtggtggcggtgggcgagggctggatcaatggaaatggtctcgttcttcttagtgtctcccttgagtctctcatgctgcaacatttcaattgtggtagcaagaggagatgggggtgggctggaagctggactcagggcctgacagtggcggggtataggagtagggctatgaaattcagtccttcacctccatcccttgtacttcctttattccagcaacttctctaactacaaggctcgcttcagcatgccgggggataatgagggcctgtggtacaggtaatgtgggggtgctgggggactggccctctcccctgaaggatgggagatgcaggggagccctggtccctgacccctgccctttgactcctccagctgggatctgggtcccgcccacatcatctccttctccaccgaggtctatttctttctccattatggccgccacttggtacagaggcagtttcgctggctggagagcgacctccaggtaacctgggtggaggcccctatagtcccctggccagccccacctccccctccacccctgactcctagcccctcaccctgggcccttctccctagaaagccaataagaaccgggcagcccggccgtggatcatcactatggggcaccggcccatgtactgctccaacgcagatctggacgactgcacacgacatgaaagcaaggtgaggtccctccctgggagacagtggggacatgctgaaagccaggtgggcgtcagtctgcgtcaccctcacccgctcattcaccctgcccaggtccgcaaaggcctccaaggcaagctgtacgggttggaggatcttttctacaaatatggtgagcgaccctcaggacccatgccccacaccccacctctccccaattcagaggtctgatccccgcttgctctatctcaggagtggatctgcagctgtgggctcatgagcactcgtatgaacgactgtggccaatttacaactaccaggtgaggcacgtgaagggctgagcgcccacacagctggggtcagggtggtcagaaggcccaggcatggcctcgagtgactgcctgccacccaacgttgttcccttccccaggtatttaacggcagccgagagatgccctacaccaacccgcgagggcctgtccacatcatcacaggatctgctgtgagcagggggaagggtggctttgccttctctctctattcctatctatggagggctaactttgttccagactgagtgctgggtgctttatatagtggatatcacttaaccctcagccctaaggtcgggaactcctagcggtatgttcattggacggatgtaggaacagaggcacagacaggaaaatacttgctcaaagtcgcaggtcaaataagtggcagaggttgggagctcccccaccataaagttactctagttccctttttaattaataactaccatggaggtccaggcacaatgactcatgcctgtcatcctagcactttgggaggccgagtctggaggatcacttgaggccaggagttggagaccagcctggcaaatacagcaaaaccttgtctatacaaaaaaaaaaaaaaaattaaaaaagaaattagctgggcgaggtggtgcttgcttgtaattttagctattcaaaaagatgagtcaggaggattgcttgagtgcaggaggtcaaggctgtagtgagctgagatctcaccattgcactccagcctgggcaacaaaatgagaccctttctctcacacacacacacacacacacacacacacacacacacaaaagatactgggtggctaggtgcagtggctcattcctgtaatcccagtactttgggaggttgaggcaggaggattgcttgatcctaggagtttgaggctacaatgagttatgatcgcaccaatgcactctagcctgggtgacaaagcaagatcccatatctaaacaacaacaaaaaaactatcttgggggagatcctgttagaccatgcaaatgtcatgtttcttttttttttttcgagacggagtcttgctctgttgcccaggctggagttcagtggcatgatctcagctcactgcaacctccgcctcctggttcaagagatttccggctaatttttgtacttttggtagagatgggatttcaccacgttggccaggctggtctcaaactcctcacctcaagtgatctgcctgcctcggcctcccaaagtgctgggattacaggtttgcctggcccaaatgtcctgtttctcctcaaactttcaccctcttattttcaaacccattagtggacgctgcctgttaacagttattactaagctgttccaatgaagacttttctttctttctttctttctttctttctttctttctttctttctttctttctctctctctctctttctctctctctctttctttctttcttttcttcctccctcccttccttccttccttctttctttctttttttttgagacggagtttcactcttgtcacccaggctggagtgcagtggcacgatctcggctcaatgcaacctccacatcccgggatcaagcaattgtcttgcctcagcctctcaagtagctgggattacaggtgcccacccccatgcccggttaagttttatatttttagtagagatgaggtttcaccatgctggcgaggctggtctcaaactccggacctcgggtgatcagcccacctcggcctcccaaagtgctgggattacagacaagagccactgtgcccggccttacagtgccattctaatggggattttctgtcgccctcactcttccaagatttacgaattgagatcctcttgcaaggctgacttgtgtcttctgccacatttgttcagttggttaattgtttatttatgtccgtgtgaactcatgggtaatttattttactctgcgggttattatccaacatgagtgttatttatctggatgtttaagttgtgccagctttggccatcagtgggctcctgtctcctttccactcatcccctccttattctctggcacttcaaaacattccaggatcatcatgtgtttttttttttttttttttttttttgctcagccttagaatctaccccttctccatggagcgaggcttagttttttaattttttaatttaattttaaaaattttggccacatgcagtggctcacgcctataatcccaacactttgggaggctgaggcaggcaggtcacttgaggtcaggagtttcagaccagtctgggcaacatggtgaaaccccatcgctatcaaaaaatacaaaatttagccatgcgtggtggtgcacacctgtagtcccagctacttgggaggccaaaatgggaggatcatttgagcccaagaagtcaaagctgcaatgagctgagactgtgctactgcactctaacctggggacagagcgagaccccatctcaaaaacaaaaatgtttttaatagagacagtctcactatgttgcccaggctggtctcgaattcctgggcttaagtgatcccccagctcggccttccaaagctgcttcttacaaatgattaagagcaaagtgaggctgggtgcggtggctcatgcctgtaatgccagcactttgggaggctgaggtgggtggatcgcttgagtctaggagttcgagaccagcctgggcaacatgacaaaaccctgtttctggtaaaataataattattattatcattatatatatgtatacatatatataaaagtaagaatcacttgtaataaaaattcaaacagttacagagggcaggaggtgaacagaagccactcacaccacacattgccccactctcggttgttgactctttttaggcattttacaatgttctctgcatatacaaaggagtaattgtttagatagagacatgttactgtattgcttacttaaaaaaaaaagcacttagatcgtgggtcatgccctagtggttctcaaacttggtgcacatcagaattacctatggagctttcaaaagtccagtgcttgggcctgaccccggacaaaataccagaatccctggcattgatctcccagagtagctgccacacggagcatgaaatagaatgctgtgagcaccagatggcttctcacggcccttggcagccaggctctgcccatgggtgattgctattctgattttatcagcacaaattggtttttttctttaattaagaaatttgaggccgggcgcggtggcttacgcctgtaatctcaacactttgggaagctgaggcgggcagatcacccaaggttaggagtttgagatcagcctgcccaacatggcaaaaccccgtctctacttaaaacacaaaaaattagccgggcatggtggtgggcacctgtaatcccagctactcaggagggtgaggcaggagaatcgcttgaacccaggaggcggaggttgcagtgagccgagatcgtgccattgcactccagcctgggcaacaagagcaaaactctgtctcaaaaataaaaaagaaaaaataaattgaaattatttcagaccaacagaaaagttgcgctaacaatacaaggactttccatatccacttcaccaatatttcccaaatatgaacatttaaccacttttatttatttatttatttattttgagacacagtttcactattgttgcccaggctggagtgcaattggcgtgatctcggctcaccacaacctctgcctcccaggctcaagcgattctcccacctcagcctcctgagtagctgggattacaggcttacgtcaccacgcccggctaattattgtatttttagtagagacgggggtttcaccgtgttggccaggctggtctcgaactcctgacctcgtgatctgcccgcctcggcctcccaaagtgctaggattacagccatgagccactgtgcccggcgtctctttcattcctttcatcagaaacattctctactctttcttcatttttcatgaccttgacaattttgaaaagcacagcgagttgttttgtggaatttcctttgggtttgtttgatgtctgctcatgattagatagaagttgtgcatctttgctaagaatacacaaaacagatactgtgttcttcccaatacatcctgcaaggaggcgcatggtgtcttttttgagttaggatctcactctgtccccaaggctggagtacagtgttacaatctcggctcactacagcctggacctcccaggcttaagcaattctcccacctcagcctcctgagtagctgggattacaggcatgcaccaccacgcccagctaatttttgtattgacagggtttcgccatgttgcccaggctggtcttgaactcctgggctcaagcaatctgcccgcctcggcctcccagagtgctggaattacaggcgtgagccactgtgctcggctgcacgatgtctttttaacctctttgagcctctgatttctcagctgaaagtgtggtacggatgggtctcattactgatgatgcttactttgatcacttggttagggaggtatcagccagccatctccaccataaagtgactctcttttttcctttgtaattaacaagcatctcctggagagatactttgagactatgcaaacatcctgttatgcctcaaactttccctgctagttttatcatccattcatgatccttgcttcaatccagtactataatgctgggtgcaaaatggtgattttcctcaccctggcatcctctctgctcctcatgcctggcttttctgctgcaagcacgagcattctgtttccccaggcgctgttgttttaaaaagctttcttggagggtctactgtgcagccaggcttcagatccagtgatttctctgttcttcaaattgctttttctccttcacacacatcttggccatctttctgtatcaccccgcttccctgctttgcgatggctgtgctataatgtatttaactgactccctgatgggcgttgggatggcttccagttcagggctttcactgtaatgctgtagtgggcagccttacacagccgtgtacttttctagaagtcagagacccggagcaagggaagcctgcctgggacaaattgttcaattgtgagtattattgtggccaagtctttttgtttttgtttttgtttgagacagtgtcactccgtctcccaggctggaatgcagtggcacaatctcggctcactgcaacctccacctcctgggttcaagcaattatcctgcctcagcttcccaagtaggtgggagtacaggtgcccaccaccacaccaggctaatttttgtatttttagtagagacagggtttcaccatgttggccaggctggtctctgactcctgacctcaagtgatccgcccttcttggcctcccaaagtgctggaattacaggcatgagccactgcgcccggcctctatggtggtcaagtcttcactgtcttccttgagggcagcagggtcctgggctagcaggtcatttctgcttccccgcgggtcctccacctgctctgggtctgatcagttctccccgccccagggctgtgaggagcggctgacgccctttgctgtcttcccgaggccctggagtgccgtgcgtgtgaaggagtacgggtatacgcggctgcacatcctcaacgggacccacatccacatccagcaggtgtcggacgaccaggtcagtgaggggcaggccgaagtcacctgactgtacagccaggcccctccaagcaaatgagctgttaaaaacgtgggctcggccgggcgcagtggctcatgcctgcaacacctgcaatttggtggggctaaggtatgaggatcgcttgagtccaggagttcaagaccagcctgggtaccatggtgagacctagtctctacaaaaaatacaaaaaatggccaggcacggtggctcatgcctgtaattccagcactttgggaagccgaggcaggcggatcacaaggtcaggagatcgagaccatcctggctaacatggtgaaaccccttctctactaaaaatacaaaaaaaattagccaggcgtggtggcaggtgcctatagtcccagctactcgggaggctgaggcaggagaatggcgtgaacccgggaggcagagcttgcagtgagccgagatcgcaccactccagcctgggcgactgagcaagactctgtctcaaaaaaaaaaaaaaaaaaaaaattaggccaggtgcggtggttcatacctgaaatcccagcactttgggaggctgaggtgggcagatcacttgaagtcaggagttagagaccagcctggccaacatggtgaaaccccgtctctactaaaaatacaaaaatgagctggccatggtggcgggtgcctgtaatcccagctacaagggaggttgaggcaggagaatcacttaaatctgggaggtgaagtttgcagtgacccaagatggcaccactgccctccagcctgggagacagagtgagactctgtcttggaaaaaaaaggaaaattagtcaagtgtggtggcagatgtctgtagtcccagctacttgggaggctgaggcaggaggatcacttgagtgcaggagttagagtttgcagtgagctatgatctcgcctctgtactccagccttggcaacagagtgagaccctaactcaaaacaaaaaaacgaacaaatgtggactgtagaactagaaacctgctcctgctgcttaccagctgagtgaccttgagtcactcatctaattttttttttttttttttgagatggagtctcgctctgtcacccaggctggaatgcagtggtgcagtcttggtttactgcaaccgccacctcccaggttcaggcaattctcctacctcagcctcccgagtagctgggatcacaggcgcccaccaccacacccggctaattttttgtatttttagtagagacagggtttcactgtgttggccagaatggtctcgaactcctgacatcaggtgatctgcctgcctcaacctcccaaagtgctgggattacaggtgtgagccactgtgctgggcccacttatctaacttctttgcctcagttttcccatctgtgagaggggataatcatagtttccacctcacaggactacatgggggttgaaggacttattatatataaaatgcttagaagagtgcggaacttggtaaattctgtaggtatttaccattgtgaggcaggggaagataaagatggggggtgggacacaggtaggggaaaacaataagatgagtatgtggtacaggtggcttaaggttaggtggatccaaataataatggctcacctttctttatttttgccattgtagttttaaaataatgacaatatttatgatttattgagcacctactgcataccaggcactgcctagatgctctgcatttagtagcactttatttatttatttgtttttgagacagagtttcaccctgtcgcccaggctagagtgcagtggtgcaatctaagctcactgcaacctccacctcccaggttcaagcaattctcctgcctcagcctcccgagtagctgggattacaggcacatgccaccacacccggctaattttttgtatttttagtagagatggggtttcaccatgttagccaggctggtcttgaactcctgacctcaggtgatccacccacctgggcctcccaaagtgctgggattacaggcatgagccaccgcatgcggccccagtagcactttatacaccaaaacaatcccacaggagtggatttcctctccattttataggtgagggaactgaggctcagagaggggaagtaattttcccagggtcacacagttggaggacggccaagctgggatctgatagctaccatttatcgagtggcacatgcaccgggcgcagacttttgtgtgcatgatctcactctgttctcatgatgactctgggcatctattactttgtgcattgcatagaacatggaagttttgctcagagagtccagcaacatgcttaaggccacctagagggtggatgcgctggccaggtgcagcagctcatgcctttgggaggctgaggcaggcggatcacttgaggtcaggagttcgagaccagcctggccaacatggtgaaaccttgtctctagtaaaaatacaaaaattagccaggcatggtggtgcatgcctgtaatcccagctacttgggaggctggggcaggagaatggcttgaacctgggaagcggaggttgccactgcactccagcctgggtgacagagcaagactctgtctaaaaaaaaaaaaaaaaaaaaaaaaggagagagagagaaagagtggatgtgctggaatataaagcaaggtctgtctgactccagagtttgtgctctaataatagcctacacttacatagccctttccatatgctgggctctgtttacaaatactatctcatttaactcccacaacatctatgatgtgggtactgttactcttcctatcacttttcagatgaggaaaactgaggcccagagaggcctagccacttgctcagggttgtacagcccatcagagggcagagaggggactggaacccaggccatgtggccccagagttcaggctttcagctctaactactgtccctgtttttgtccctcacaggatgggaagatcgtagatgatgtctgggtggtgagacccctgtttggccggaggatgtacctctagggatggcggcagctctcctccagaagcctaggttttgccgccttggctgctgtgaccagaaactgcccaggcctgggtggggagttgggtgggccctgactcccctgccctccagaggccccatgtagggtacatgcagccctatggagctggggcagctgttccctcctggagaggtgggagtcctggctggctgtggagggagggcaggtgtgcgggcacagagtgacacacggcaggtttctgctggcagggccccaccctcctgcatagctctgatcgggcgaggtgcccacggggcttcaggaatgaagaggcttaagctctggctccatggattctgcacatctgcgggggatgccgctgggcttcctcctctcctgcccacctggcaagggcatcgccaggtgggcacaaccgtcatgacactactcaccagcaggtggcgtcaggggctttttcttctgagcccggcactgagagttggtctgaagcctggctccttcttcactgctccaggactgctatgaagagtcccttcatgcctcagtttcccagcctggcaccatcttattcgggaagaggagacgtgttaacactcttgcctcctagctaggacagatgacaaaccgcaagagccacagacttgccagttccttccctctttccttcctttctttcccttcttttatttattgaatcataatttattgagcatctaccatgtgccaggctctgttctcagtgctggagagacagctgtgaatgagacagagatctcggccctcacagagctgacatcctaaccagagagttggacaaaaatcacgataaatgagttggttaaatagcgatttgtgagtagaaaacgcagggacggtgagagagcagtttcaattttcagggggatctcactgagagggcaacatttgatctgaaggaggtggggaaggagccaagtgggcagacatctgggggaagagcattccaggcagaggaacagccagtgcaaaggccctgagacagaaatgtgcctggccggctgggtacagtaactcacatctgtagtcccagcactttgggaggccgaggcgggcagatcacttgagcccaggagtttgagaccagcctgggcaacacagcgaaaccctttctctaccaaaaatatgaaatttagctgggcatggtggtgtgtgcctgtagtcccagctgctcaggaggctgaggcgggaggatggcttgagcccaggaggttgaggctgcagtgagccatgattgcgccactgcaccccagcctgggcaacagagcaagaccctgtctcaaaaaatatatataaataaaaaagttttaaaaagagaaaaataaacaaagaaacgtgcctgccctgttggagtgtccacgaggaggccactgtggctggagcagggagagtgagagggagaccaagcttgaggacagggcagtggtggggatggcttgtatggagccttacaggccacggtgaggactttgggtggagccaggggaggctctgagcaggtgaaggaagtgatcggactccacgagtcacaggcaaaggccccagggctgacagctgccccagggcctgcgggctcccagccctgccagatgacctgagatctatctattcccccgtcatggggcgcggtttctgcctccacagatttcattccctcccacccgcccctcacttggcccaaggcacgcaggactccttgccgttcctggaacacagccagctctttctcactgcggggcctgggcgctggctgtctgccccctgtgtgccctctccccagctcatcccaggctggcgccttctcaacctcaggtctcagactcggtgtcccctcctcagaggccttccctgctgaccccagctaaagtagcctgtgttgctgcctgccccacccccgttttacttcgatctgcaattctttccttgattggttaacttgttcattggctgtttacacccgtaaagctaagtctgtgagggtggtgaccatgagttcaacgcctctgccaaatcctcccaggccccttcttgggctggattggggactctgggctccccgctagttccagtcctgcgcattctaggccatcaccgtttggggatgggtctctctgactcccccactggacttcaacctcagagggatggggcccagagctgcgtcccagcattgcccagcacaagatagatacttaataaatattgattgccttaatgaaggccaccacatgccaggctccagccgggcaatgccagggacagcgatgaatcagctacagtcatgccctctgggagctcgcaggcaggcagggaaacacggttactcaacacaggtgatgagcagtaagagaatcccgtggcgggccgggccaagacggtgaggtcacaagctggacggtcatggagtgctgtggccgccgactgaactggtgccctgtgtgggtctggcatgccctgtcccgggctgggtgaggctgtggacatgccgggaggtggcaacctccacagagggcagaggtcagacactggagtcaaacagaaactggttcaaatcccagccccaccaattcctgtgtgaccatgggcaagtcggcaaccctctctgaatctctgtttcttcatctataacccaagaatgataatactctgtgaggctgccttggggttaaatgagattgaaagccttgggatcgatattgattcctctttttctcatgctccacatccaagtatctggaaaatcctgtttgccttgccttcgaaatcgatctagactctttttttttttgacatggagtttcactcttctcgcccaggctggagtgcagtggtgtgatctcggctcactgcaaactctgcctcctgggttcaagcaattctcctgcctcagcctcccaagtagctgggattacaggagcctgccaccacacctggctaatttttgtatttttagtaaacatggggtttcacagtgttggccaggctggtctcaaactcatgacttcaggtgatccacctgccttggtctctcaaagtgctagaattacaggtgtgagccactgcgcccagctcgatctagactctctacgcttttggcacccccaaagcccccaccctggtcctgtctacactcatttcctacagactccttggacttcctgctccctccttttcccgggagtctgttccccacacacaaccaaaggcacctgtgaacacctgcatcagatcacatccgcccctgctcagagccctcctgtggctccgtctcaggtccacgaggccccagacgatctgcccctgtcacccctgtgtcctcaccccctccaatcacccccctcgcccactctgctgcagccacactggcctctgcattggactccccacccacttttgcactggcagttccctctgccggggacactgttcccccagggatctgtatgactccctttatccccccctcaggcctttgctcagtgccaccctccctgaccctcttgtttaaaacagctccacctaaccggaggtcatcaggttcggtgaaataagccaggcacagaaagacaaacctcgcatggtctcactcatttgtgggagctaaaaatcaaaacgatgtcatggacacggcgagttagaaggatggtgaccagaggctgggaagggtgctgggaggctgcaggggatgggctttttttgtttttgtttttgttttttgagacggagtcttgctttttcgcccatgctggaatgtaagggtgagataccggctcactgcaaactctgcctcctgggttcaagcaattctcctgcctcagcctcctgagtatctgggattacaggcacccgccaccacacctgactaatttttatatttttagcagagacagggtttcaccatgttggccatgctggtctcgaactcctgatctcaaatgatccgcccgcctcggccttccaaaatgctgggattacaggcgtgagccactgcacccagcctcggttttgttaatgggctaaaaaaaaaagaatgaataagacctactatttgatcacacaacaagatgactattctcaataataattgtacatttttaaataaccaaaagagtgtaattgggttgtaacacaaaggataaatgcttgaggggatggataccccatgcctgtatcaaaatatctcatgtaccccataaatacatacacttactatggacccaacaaaaattaaaacctaaggctgggcactgtggcttatacctgcaaccccagcactttgggaggccgaggtgggaggatcacttgaagtcaggagtttgagaccagcctggccaacatggtgaaactccgtctctagcaaaaatacaattagctgggcgtggtgatgtgcacctgtggtccagctactcaggaggctgaggtgggaaaatcgctggagtccgggaagttgaggctgcaatgagccaagatcgcaccactgcacgccagcctggatgacagagtgatatcctgtctcaaaagtaaaaaaaaaattaaataaattcttaaaaaagtaataattaataataaaataaaacagctttaccctccatacacctcccatctcccttctctgctttatattccttcaagacactgagggctgggagcgatggttcatgcctataatcccagcactttgggaggccaaggtgggcgggtcacctgaggtcaaggagatcaagaccaaccggaggtcatcgggctggccaacatggtgaaaccccgtctctagtaaaaatacaaatttagctgggtgtggtcatgcacacctgtaatcccagctacttgggaagctgaggcaggagaattgcttgaacctgggaggcagaggttgcagtgattcaagatagcaccacctgcactccagcctgggtgacagagcaagattccatctcaaaaaaaaaaaaaaaaagcatttagatcttgtgacccactatatacatacatgtttgattatttttttccttttctcccccaagagaatgtgagctccctggacaacagggtttttttgtttgtttgttttttgccagttctgtcccctgctgttaccttggtcactggtatatagtaggtgctcaataaacatggtttacgtggaagaaagaaggaatgagaaataaaggtaagcttagcacagggcctggcactgagggatgcttatcagtaggaatgacagtgacttaggtgactcagataaaggctcagccctcgggagctccccgtggctgggtgcgcagcagacaggcacgcaggactggttgcaacacctgccctgtgtgacgtgcacaggaagttgcaggttgcagggccagagaccctgaagcttctgagaggcgaagctgagcaaggtctttttttttttttttttttttgagacagggtctcactgtgccgcccaggttggagtgcagtggtgcaatcatggctcactgcagccttggcctccccaggctcaaatgatcctcccacttcagcctcccgagtttctggaactactaggcgtgccaccatacccagctaatttttgtattttttgtagagatggggtcttgttatggtgcccaggctggcctccaactcctggactcaagcaatcagccagccttgaccttccaaagtgttgggattataggcgtgagccaccacgtcccccgccacaaggctttcaaaggccgcacagatgcctacgctgcaggctggggttgggaggtagcgggtggtcccagaaagggaagcagggccacggggagagctcatgggaaggctgggggatccatggggctctggattcattcatcaataagtatttatttattaaactcctttgttgctcaaatcagccagaagtggtttctgttgatggcaactgagaaccatgaaagaaacattgaccccctgtgaagggaaaacctttgaaactgtgttttttctctgctctcacaccacaacggccaggtgcggtggctcacacctgtaatcccagcactttgggaggccgaggcaggcggatcacttgaggccaggagttggagaccagcctggccaacatggtgaaaacccatctcttctaaaaatacaaaaattagccaggtgtggtggcaggtgcctgtaatcccaggtactcgggaggctgaggcaggagaatcccttgaacccgggaggcagaggttgctgtgagccgagatcgcaccactgcactccagcctgggcaacagagcaagactctatctcaaaaaacaaaacaaaacgaaacaccacaacaacaatcatcaacatagactgtgatcaaacgcagggggcgggttcttccacagaccaggcagcagacaccagctgggtgtcctccaactcatttctgacaccatctacccaaagacggcctcagatcccacaggttgagggttcagtcccacacactgctccctccctccccagccgcatgtctgggtctccggaacttctgactggccagcttcaagttagggtttccacgaccccctcttggggttcgatttatttgctagagcggctcacagaactcagggaaacagttacatttgcaggtttatgactaaggatattttaatgaagagatgcatagggtgagcatagcagcttctgtccccatggagttggggcgcaccaccctcccagcacctggatgagttcttcttttattcttattttttgagatggagtgtttcactcttgttgtccaggctagagtgcagtggtgcaattttggctcactgcaacctctgcttcctgggttcaagcgattctcctgcctcagcctcccaagtagctgggatcacaggtacctgccaccacacctggctaatttttgtattttcagtagagacggggtttcaccatgttggctaggctggtcttgaactcctgacctcaggtaatccacccaacttggcctcccaaagtgctgggattataggtgtgaccgactgcacctggcctatttttattttattttttgagacagcgtcttgctctgttgcccaggctggagtgcagtggtgcaattacagctcactgcagcctcaacgtccagggctcaagcaatcctcctgcctcagcctcccaagtaactgggaccacaggtgagttccaccatgcccggttaattttctaaattttttttttttttgtagagacagcggtgtggggcgaggggtaggggacgggtcttgctgtgtttcccaggctggtcttgaactcctgggctcaggtgaccctcctgcctcccaaagtgctgggattccaggcgtgagccaccacgcccggcctgcatcttatatttttattggctaaatttggccatcctaagattgagcaagggggacatggagggagatgagaatagagcatgtggagtgggcaaaaagttgagaaggagactcgcagatcctacaaacacagccaaagagacaaacctcttggaagttttttgcaagggcttctgttatatgggctccctccttggacaggagtccctcctcccagccccttcctccctccagatcttcagtgcttcttttcagcaaattttaaaaatggtaatagttttattttatttcaggtgagaaagcaacacactcattgctaaaaatatataaactcaaaccatgcaaaaaagaataaagcagacacaaacatgatagttatgtgaggtaatgcatatgttaattagctagagttagtcatcccaaaatgtatatatacttcaaacatcgtgttgtacacgttaaatacatacacttttatctgttaatttttaaaaagagggctgaaatcccaccactttgggagaccaaggcaggaggatcgcttgaggccaggagttcaagaccagcataggcaacaaagtgagacactctccccgtccttgctacctagctagctaaataaaaaagaaataataaaataaaataaaaagaatgtaggccaggcgcggtggctcactcctgtaatcccagcactttgggaggctgacaagggcagatcacctgaagttacaagttcgagatcagtctggccaacatggtaaaatcccgtctctactaaaaatacaaaaagaaattagccaggcatggtggtgtgcacctgtaatcccagctgctctggaagctgaggcagaagaatcacttgaacccgggtggtggaggttgcagtgagcctagattgcgccactgcactctagcctgatgagagagagagtccgtctccaaaaaaaaaaaaaaaacacaacatatttatatggccttttgttaaaattgataaaccaatattgatatattattattaactaaaatctaaattttattctactgcattttaaaaacattttaatataactctattgagatataattttttttttttgagacggagtctcgctctgttgcccaggctggagtgcagtggcgagatctcggctcattgcaagctccacctcttgattcatgccattctcctgcctcagcctcctgagtagctgggactacaggcacccgccaccacacccagctaattttttgtatttttagtagagatggggtttcaccgtgctagccaggatggtctcaatctcctcacctcgtgatccgtctgcctcgttctcccaaagtgctgggattataggcgtgagccactgcgcccggccttttttttttttttttttttgagacagggtctcactctgtcacccaggctggagtgcagtggtgtaatctagctcactgcaacctctgcctcccgggttcaagtgattctcctgcctcagtctcccgagtagctgggattacaggagtgtgccaccatgcccagctaattttttttttttttttgagacagagtctcgctctgtttcccaggctggagagcagtggcgcgatctcggctcactgtaacctctgcctcccaggttcaagtgattctcctgcctccgcttccctagtagctgggactacaggtgcccgccaccacgccagactaattttttgtatttttagtagagacggggtttcactgtgttagccaggatggtctcaatctcctgacctcgtgatcagcccgcctcggtctcccaaagtgctgggattacaggcgtgagccactgcgcctggtaaattttttgtatttttagtagagatggggtttcactatgttgaccaggctggtcttgaacttctggcctcaagtgattcacctgcctcagcctcccaaagtgctgggattataggcgtgaccaccacgcccggcttaagcatcagttttgaaatcaagatttcctggttacaagcccagcagagttgcttccaggtggtgggactttgttctactttccactctatttctgtgcctcaatttcctcatctgttaagtggagctaaagatcccactttaaatataaatagtgacaattagataagatcaagtagttaggcagggcatggtggttcatgcctatagcccagcactttgggaggtgaaagtgggaggatcacatgaagccaggagttggagaccagcctggccaacatatcgagaccctgtctctacacaaaatttaaaaatgagctgggtgtggtggcgcatgcctgagtcccagctactcaggaggctgaggcagaagaatcacttgaacccaagaataagaggttatagtgagctttatgatccagccattgtactccagcctgggtgacagagagaccctatttttaaaacaaaacaaaagatatgtaggtaaagtggatttagagaaggtctggcatagagggtagggaaaaacttggaagcaacccaaatgtccaataataggggattcaagtactttttttttttttttttttgagacagggttttgctctgtcacccaggctggagggcagtggccgatctcagctcactgcaacctccacacacaccccctccccaactggctcaagtgatcctcccacctcagcctcccaaagtgctgggctataggcatgaaccaccatgcccagcctgagtgcccagagtagctgggattacaggcatgtgccaccatgcccagctaatttttgtattttagtagagctggggtttcgctatattggccaggctggtcttgaactcctcatctcaaatgatctgcctgccttggcctcccaaagtgctggaattataggcatgaggcactgtgcccggcccaagtacattatgatacatcaataatattacatataaaaagcaatagttataataaacattaaaatagtacttactaatgatgaatatttgcatatatacacctttatctatgtttttttcctaaagaaagcaacactagtctttctttccctttaagatcagttcctagaagtagaattgctgtatcaagaggtagataggaatattaagtctcttaataaatatcaccaaaaagctgcccagatccagtccacagtggggtatgagagtgctgatggcgtgtactctcatcagcactaattatatattataatatattaatatttaaaaacatttttctgagagaccaaaagcaaatctcagtttaatacttatttcattaattgcttgttcaccaattcaatttttttgtattcactgttatttatttatttatttattttaggtcctttgcctgtttttttctgttgtatgtttacctttttctcttattgatctgcagatgttctttacatatgaaagacagaaagcttttcttgccatccatatgtcacaacttatctttttccttgatgtactgaaatgtatcatttttatgaagccaaatcctcttcaccctcctcgcctttttccatccctcaagagtcacctcctcaacatccccactgggaagccttctgtaggaggctctttggagtctgattttcctctcccagggtcctggagtagcagggcctgattgctcaccctgagtaagcccttggggtagatctgtccctgggattgttccaggggtctgactattgatgcaatccccaactaagttacaaggggacttccccaaaaatgagttctagaacctaaggctctgaagtttgtgcagggcgttaaagaggcaaaggctgcacctgcccctcctcccgttactatgacctgaataaggtgttgtcatctcagctcctggtcttggttttttgttttttttttttaatgaagattctgcaagacacacaagcatttcaaaagagtgcaaaaacaagaatgtttcatgctgacaaggattatttttatttatttatttatttatttatttatttatttatttatttttgagacagggtcttgctctgtcaccaggctggagtgcagtggtgcaatctttttttttttttttttttttgagacagagtctcgctctgttaccaggctggagtacagtggcttggtctcggctcactgcaacctctgcctcctgggttcaagcgattcacctgcctcagcctcccaagtagcggggattacaggcacgtgccaccacgcccggctaatttttgtatttttagtagagatggggtttcaccatgttagccaggctggtcttgaactcctgacctcatgatcctcccgcctcggcctcccaaagtgctgggattacaggcgtgagccaccgcgcccagccaagtggtgcaatcttggctcactgcaacctccacctccggattccagcgattctcctgcctcaggctcctaagtagctgggattacagacgcctaccaccacgcctggctcatttttgtatttttagtagagacagggtttcaccaagttggccaggatggtctcgatctcttgaccttgtgatccgcccacctcggcctcccaaagtgctgggattacaggcgtgagccaccacgcctggcccccagtgctgacaaggattctttaaagggcgcattctctctgaaggctggtgggagcgtgagttggatccctacagcacaatttggcaatgtgtgtcccaggccatgaggaggcagcagagggcagtcaatgagaacagtgcccgggagtcaaagctgggtttgccccattggtccttgagtttgagcaagtgaagttacttctctgagcctcagtttcctcctctggaaaagggatgaatattcacagctttagctgttacaattacatggcttagcaccctgcttcctgatgcacagaaatgcttgaaacatgggaactgttactattcttttttttttttttgagagtctcactcactctgtcacccagggtggagtgcagtgatgccacctctgccacctcggctcactgcaacctccgactcccaggttcaagcgattttcctgcctcagcctcctgagtagctgggattacagatgtgcaccaccatgcccggctaattttttgtattcttagtagaaacgggggtttcaccacgttggccaggctggtctcgaaatcctgacctcaagtgatccgcctgcctcggcctaccaaagtgctgagattccaggcggaagccaccacacccggccactgttactattcttaattcttaaagatacaccttctccttgacccagaagtttcatttgtagtaggaacaataattagagacaggcacaaggaaataattagagatggtcacaaatatttagctgcttggattttgcatgacagggagggggattatttataatggcaaggtactacagcatagatgttcaaaaggacagtgattaaacaaattcgagttcattgataggatggcatcttatgcagccattaaaactaatcttcttgaagaatatttaatgacatggaaagacactggtgatatttacaatcttgtggtttaaaagacaacattctaggctgggtgtggtggctcacgcctataattcaaacactttgggaggccaaggcggggcggatcacctgaggtcaggagttcgagaccagcctgaccaacatggagaaaccccgtctcaactgaaaatacaaaattagttgggcgtggtggcacatgcctgtaatctcagctactggggaggctgaggagggagaatcgcttgagcccgggaagcaaaagttgcagtgagctgagatcatgccattgtactccagcgtgggcaatgagagcaaaattccgtctcaaaaaaaaaaaaaaagacacaacattctttacaaacgtatgtttccaattctgtcaaaagaaaaaaggggtcagtcatggtggctcacacctgcaatcccagcactttgggaggctaaggtgagaggattgtttgaggccaggagttcaagaccagcctgggcaacacagcgagaccccgtctctactaaaaattaagaaaattagccaagccaggtgcagtggctcatgcctgtaatccaacactttggaaggccaaggcggacagatcacttgagaccaggagttcgagaccatcctggccaacatggggaagccccgtctctactaaaaatacaaaaattagccgggcatggtggtaggcgcccaggagtcgtttgaactctggaggcggaggttgcagtgagccaagatcatgctactacactccagcctgggtgacaaagtgagattctgtcgaaagaaagaggaaagaaagaaggaaggaaggaaggaaggaaagaaagagaaagaaagaaagaaaaagaaagaaagaaagaaaattagccggtgtggtggcttatgcctatagtcccagctacttgagaggctaggttggaaggatcacttgagcccaggagtttcagactgcaatcccgcctgggcgacagagtaagacccctatctaaaaaaaaaaaaaaaaacaaaaaacaaaacaaacaaaaaaaaaaacgaatgaacaaataaaaagaaaaaagataggtaaacataaagaaaaattaactcatcattcaatcattcattcattgttgccaccgacattagtagaaattaattaaatgcctactatgtggctgttctggggcagaggagaagcaccaaacatttaagagtatctctgaaggggtggaattaccacgcattcaaacagcccttccaccaatgtttactgagcatctacatgccaacagtgctggggcactgggaatgcagcagtgaacaaagacagaaatccatgttgtcatggggctgacattccagcagaggagacaaccaacaagcaataactacaattaggagtgagaaataagaacaaagcagacagagtttggtagtatgtgagagggatgtttgctgctttccttagggtgagcgagggaattagttcacagagaaagtgacatctgtgtaaagccctgaaaaaagggagggagagataaggatacctgggggaagagtatgttccaggcagaggaacaaccagtgcaaagactgtgaggtgagagcgcacctgacaagagttcaggaacagcatgaaggctggagtccagtgaataagatccaggaggagagatgtctggccgggcgcagtggctcacgcctgcaatcccagcactttgggaggccgaggcaggagtatagtttgagcccaggagttcgagaccagcctggccaacacaacaaaactctctctttaaaaataaaagaaaaaggccagcttggtggctcacacgtgtaatcccagcactctgggaggccgaggcggatagatcacctgaggtcaggagttcgacctggccaacatggtgaaacgctgtctctactaaaaatacaaaaaattagctgggtgtggtggtggacgcctgtaattccagctactcaggaggctgaggcaggagaatctcttgaacccgggaggcggaggttgcagtgagctgagatcgcgccattgcactccagcctgggcaacaagagcgaaactctatctcaagacaaataaataagtaaaaataaaatttaaaaaaatttttaaagaagatgtctgctgtttgttttcaatattttgaccaattacttcgtaaaaacttatttaaaaattgaagagcaaacagtctcaggttcccgggctcagacagaccagcgttcaaaactcattaccttctttctatgatgctaagccagctatttcaccctctgaacctctgtttctttatctgtaaaatgggtattaatgatattataccacagggttgtatatgcagcgagaaaatgcaagtaaaacacttatcccggtgcctgcctcctagtaagtgcttaagaactgtttctgcccattaactcattactttctcccagcccctaactccttctgggggggaagttagaaaatcggtatcacacgaaaacagtcatttcccctttaaggacctcagtgggccgggagccagccttcccgcaccttttccaaaatttccaatccccgcttggcattttctgcccgaaggtctccgattggacgctctgtaccaatcggaggctggagcgggccctgagaggcgcccgactccgcccccgcactggccctgcccactgcccggtcagcctcgttgctatggggactggtgggcggtgaggggggaaagccccggatgttcgttggggattcaacatggcggcgggagtgtccgcggtggtggcggtgcaagagagctgagggaggcgcgagggcgcggagttccaggtcgagcagttaggccgcgagcgactgcggcgccgagccggtaggataaggggtccggccaggggcttgcggtgggccgggcgctggcggcgggacggcgtttccgcgaggaggggggcggggccgccggggtcaaaggtcactggtggagggaagggtcgcgtccgaggggtcgggggttaacgcagactggagggagttgtagtggaggtcggagatcaaaccagcgaagggggcgtggcgaaggggagtgcaaagtttgaaattcgaagtgggggcgcgttcgaggggttctgggcgagtctcaaaaaaggcagggtcaaagttaataatttgagggaaggctgcccccacgagggtcagaggtcacagccccaggggcgccaggttggaggtttaaagctgcccctagcggagcagatgaatgagttttaggttcgggggcgtcttttaggggttcaaagctggggcgtgcctagaaggtacaaaggtgagaatctgacagcggggcagctgtttcccagagtcaaaaattaaaacccaaggagggcgtattgcgggggacgggggggggggggggggccgggtcagagatgcttcctggtgacaggagaagggggaaccctcccacaaataataatggcaaacactcatgaaacactatgggctagaccctctttttaacgctttacttgtatgagcttattcagtcctcactatagtcttagggggtcttaacctggtattaagaggttaagtgatttgcacaaggtcacccgatgcataagttgtgcgctgggattctaactccggagttctggcccagagccctgctctggccgaccgcctctcaaatcatcataatgtcggttaatgtttaatgagggctcacactgtgctccacgccctgtgtgcccggtcgtatttcactcctgctgcaatcttgtgaagtgagtgctcaagatgaacctactttacagacgggaaaaatgaggctcagaagcttctgctgaaggcagagttagaatcgaagctgggcctgggtgattccagggctcctgcccctggtcgccacattgtccgctgccagccattaggtctctcctggaagcagggggctgggcagggctgggccactccctgggcggatcggattgtctgcttggtttccttggaagggtgtgatctggcagggaagattcctgtgagcctatgggagtagggtgtttgtaggtggtctggagtccgagcaagggagtccgacgggcttctgactggggagagtgtccctgggtggtaccctgggcagagcggggtgttcactgttcttaaaaccctaagctctcactgtggtccttagtcactcccacctcacttcttatggctctgcccatttctccccagcccctttactgttctccaactccaggcccatgcctcccgcccggtctttgaccttcctgttccttctgctgggaatcctttccccaccctgccctctctcactgacgggtcgctcactctcagctggcccgggaccaccctggctcgccttgctgcaggctctttttctctcatctgaccagcccttacctccctccttaccttaattattagggtgcatggtggaattgctctgtggggttccttgcctcggtccccactgaagccctgcctggcctgcagaggatgtgacattgctgggggttgactgttgggcactgtgccgggtgctgggagtgtggcaggggacgagatccacagagcccctagcctcagagggcactcagttccctggtgggagcagagtggaaccagcccccaagccagtgacacaagactgcgtctctgcaaacggtgatgtggcttgcgagggcatcttcagagagccgggagagtgcccctaccctgggctgaagcctgagtccctttcccctgggaaggctctgaaggatggggaggagggctgggaatgggcttaccaggcaggaggagcagtgtgtgcagaggccctggcatgactggaggtcaggactcgggtgcacagttggggatctgggcaacacgtagcctgtgcaggttcagggcaagacgctgaggggactcagctttggagggacggtgggagcaggggagggctgaggagtacctgtatgtgtggagctgcctgaggccttgatggagcgtgattcagaaagcagtgctgggccagagatgcctggtacacacccctctccatcactcacagagcatgtgaggacctccgtttccacttctgcaagatgggcatagtgttagcgctgcctcatagaattgctgtgaggatgcaggctagagagccttggcccaaggcctggcatacagtagttgctgtgtaagcattagtcttgctgctgctgctgctgccaccccaccactgcctggggagggcctcagagacagtggaggccctcgctccacctgcctcctggctttctctggcagccaccccatccctacctggctctggcagggtcagggagccggcacactgccaggcagccctctgaggctggcccagcctcccagccttgcagtgccagctcactcagcatctcagggtttggcacagataaagaaggatagggtttgggcattggagacccatattcaggtccctcccttgtcacttaccagccatgggacaaatgatttatttgccacttttattccttcaacacgtttggctaggggaaaaagggctttcagtataatgaaacactcatgcatccggccatcgtctggcctgggacagaacacaccgtgatacagttagaggccaagggtctcctcctcaccccccctcctccctcccttccaggggcagcctctgtcctgggtgtggcagtcaccattcctctgcagcctttcatactttgactgcccttgaatgtattcaccaacagtagagcaacagctcttgcccctggctgcacattgcaactccctggagagctttgaaaagatgccttggcccaggcccgccatggaaattctgcttccaacttacttggtctgggctggggctggcctcaggcttttggaagctccctgggcagttcttatggccagcaggggctgacgactgttgtttcacagttcagataaatggtgtcaccataaacatgcctttctgcaagttgctgtttttgttcaacattataggtatatttgagatgggatcttgctatgttgcctagactggactcttaactcctgggctcaagctatcctcccacctcagcctctggagtagctgggattacaggcgcgcacacctgctccccgctttgagctgagcattggagtctggatgtctcttggtggggatgtgtgtaggcctgggacaggccatttgtttttcctgatggtgtttctttttgtgatcgtgtcacacaggagttgcctgttcacctgttgatggccactgaggtggtccgttggagctataaccgtgcagcagtgggccttctggaacgcgtgttcctgtagaccatggccagagtctctctggcatatgcctagtagtggaaaagccggagctccccgctttcctagcggttgccaagtcatgcccccagtggctggaccactgtgctccccagcaggctccggggctccctttatttcaagtcctgctttgggcagctttgtggccctcactgaaacgatttcctcggccgtgacatgggaggtttatgggcccacccacccacccaccaggctgtttggaaacagatggggagatggttcacacaactggcttagctgggacctcgtccccactgactccctacaaccacaggagaagaaaggatggaagggctttcacctttacccccttgggcatccaggacggtgactgcagctttgccccaactgcccttgggggcaggtgccaggggtgacagctgggaaagagaactatactgattcgaacctctcaggagggaggcagggaggacggaggtgaaagttggaggatgggtgaggccttgtaacattctttctgtgtatctgactgttggtcccagtggtaaccaacacagcccagctctacccttgtagattatagtacagtgaaggagacagacctgctgtccccagacggtgacagcccagagaggccagggctgtgaaggagaggcctaggcgagggtcagggcgggatgtgggggggacccaggcagaagggtcagggcgggatgtgggggggacccaggcagaggggtcagggtggggtggtgggacccaggcagatgggtcatggcgggatgggagcggggacccaggcagagggatcagggtgggactgggggggacccaggcagagtggtcagagaaggatggggaaacccaggcagaggggtcagggcgggatggggaaacccaggcagaggggttggggctggatggtggggaggggcacagagagggattgggactgggatggaggcgcagggaccgtaggaagcccgaggaggcatgtggcccagcgtggggagttgaggagggctttctggataagatgacatctgactgatgagaacatatgagcgaggctggaaggaggtggaaagaatgtaacaggtcatgggtacggaagtgccaaggccctgagggtcggaatgacctcggaatggtcgaggatcatcagataggccggtgtaggctatgctgtgcaccctgactgtgtggtagccttgctctgcaaagagcagttaaagaaatacataaaatataaaataaataaataaataaaaaagcaaaaaaaagaagccagtgtggctgagcagggggtggggtcagaggcttggaggcggtgttggatacagcagggcctagcagagccaggtggggtgtgtggattccattctgtgcataatgggaagtcatcagaggctttagtgacatctggttttccccttataaagattgctcaggctgctgtgtgggggacggatcgcggggggtggcgacagggaggctgtggggaggctgctgtgacagtccaagcagaagagggtggagaagacgaggggacagtgatggaggagcgtcctcgtgccagctgaggtcatcagcgctttacccctgttacctcacttcatcttcacagcaacctgtgaagtaggtgctagtatcatcctcactctagagatgagaaaggaggcccagagaggtacgggacttgcttaaggtcacacagcaggcagtggcagaggtaggattgaaccccaggccttggggcttcagtgtcactgattactggggctgccctcccgtggtttggaactggctcggacaagacaggcctgattcctgttcagctggttcttacccaggctcctttgttgacagaagttccgtggagacctgttccccctgggtagtttctgggcgctgggtccctacctccctcagggcctccctttcctttctcatctactcctcgtcccactggctcgtggtgagccagacttcctggccagacaccggtcaggggtgtccccagcagctgtttctcccatcaccgagcccagccccgcacatgctgccagcaggaagcaacctccttccaagtcatggccagggaagtgggacccttcccgcctagtcacccatccggggccaaggcttcttgtctgccagacgccttggcccacaggaaggttggaggggccgaggagggtgagaaggggaacactctcccatcccaggggagccagcgctggcggatgcgacagaagccaccgctcactgaagcctctctcctgggaccctccggtcctgccccgacccttcccaggctgggaggccatctgctgccttcccgaggggcagtggaacttccctgccagggctgctcagtccacacacatcccttagcctttttcactagctgggagcccctggggaagagacaaagaacttccctgggcctctgattcctcacctgttacagggagtattggtggccacctctcagggctgtgggagggcggaagatcatgtgtgtgcgtcgtgcttagcccgatgctcagcactcagtaagtgcttggtaaatgttgaacttggtgcgttcgatggtttccgtcccttgcaccctgtccccctctgggttctcatcccgtagtgagctgtaataaccccagccccccgcccggggtcccagctccacgtgccaggcacgcgtgtgctgtgagtctatgagcatggtcatgtggctgtacccagagaccctgaggaggaggtgtttttaacctcgtttctcttttcccgtgtttcaattttcagaaagcacgtttttcctccatgtgcatgcattacctattcccctaaataatcactgaaaaactgcacacagcacaaaaggatgtacagggacgagcaaatctctttcccacccgcctgccaggcccttcccagagatagcatcatcacccccggtttcttttctttctttcttgaaatatttgttcccccaagtgcccgcccctcccttttgtttttactcaaatggagcggacttcccatgtttatattctgtcctgtgctttgcgtttcccactccgaagctcgctgtcaggacacagagtgccgcctcgtgtcccacgcacacgcgtgcccccacggacagcacagccattctgtgctgatggccatcaggccattcccatctttccgtgctgtgaacagggctgcgcccgcctgagtgtggctgtgcatatgtctctaggtgtgagtctgagcttgtggcctcgtggtctgagacaggtgccccgttaactttgccggtagtgttagtgtttcaccctgctggggaggttgtctggctcacactcccaccccccagtgtctgatgacaccggggtttcctcactcccttgctggaatagacgggtgtcacctgacattctcacctttgccagtcagataggtgacaaacagtctcatcatggttctgattttaatcagagcaaagtgggacagctttgtgttgttgaaagccatcttgagcttccttttcttggagctgtctattcctgataattttactttctctgagaaggggaaactgaggcacaggccagcagtcccacagcaaatacgtggcagatgtggcactcaaaccttggctccgttctggagctcctaacccatctgacacagaagaggtcaagggcttggcctccggagccagctttgtctcttactagcagtgtgaccccagacaagtcacatcacctctctgtgcccgggtgtcctcatctgtaaaatgagggtgctaatgatatctactcttagagttgttttgaggatctaaatgtatattcggcaggcaaaatgtatagtaagtgctcaaagactgttagctgcgttactaatagccgtattattaatattatagctatgtcaccaatagccatgttattaatatgagcaggcactgtttgagtgctttctgtgaactaacctactggaccctcccatcaactccaagacacacgtgttcttaggatctcccttttctagggaggagactgagagcctgggggacctggccccgtcacagagcaagaggaactgggatttggatgctggaggcctggctggtaatcgctgtggccgcttcccctgctacccggggctaagcctgagggttacaaagctctccctcctgcttcccccacccaccttctgctgtctgcattccaggcaggctgcccaggagctttcgagcagacaccttgagggttgggagcaccgggtgggcagggtcctcacctagagagctccccgtcccagaccctccctgctcctgccacctgtcctgggaactcctgataaagcagcattgtgcagcggttttgagttcacttcccagcccggttttgccactcccacacttcactcccagaggcggaaggcggccggtcttcctgggctgcgtggggtgccagcccccctccccttcccttccctccctcactgcgcccacagtcaccggtcagcactggccatggggagaaagtaggaccctgcgggccactggcccctccacagacccgtccccaggtgaagacccctccctgccctccccacaggaggcccctgtccttctctcccgaggaaccctccttccctgccgcccacaggggcctccatagttctgtcgtcccttccccgcaaatcttccactgcagcctgggcccacgttatttgactctcaaatgctatatatatacacagcgcttctaactccactgcttttaaaaaacctttaataattgtcaattataatatgcccatagaaaagtgcataaaatgcacaggtaagtttagcaaagaattacaaagtgaacaacgcttccccaccacctcggtaaagacagaacacaacctcccaaaagccgcctgcccataacccctgtccatcacgaccacagtcgtgagtgctctcctgaccttggtggtcactgtgtccttgcttttcctgatagtttttaccatgaggtatgcatccttgaattacagaatgtcatcttgcctgcttttgaacttgacataaatggaatcttccagtatgtccttgtctgtgctttctttcgcccttaggcctgtgagatccatctgtgtgctgagtgtatctgtagtcattcatctttgttgctgtataatattctttttttttctttgacacagagtctcgctctgtcacccaggctggagtgcagtggtgcaatcttggctcactgcagcctctgcctcctgggttcaagcgattcacctgcctcagcctcccgagtaactgggattacaggcatacaccgctatgcctggctaatttttttttttaatttttagtagagagggggtttcaccacgttggccaggcgagtcttgaactcttgacctcaggtgatccacccacctcagcttcccaaagtgccggcattacaggcgtgagccactgtgcccagccccatataatattctgttcctccatctcctgctgcgctgatgcgagccatctctttgtagcatctcctggggtgccggtgcctgcgtttcttcagggaatatacccaggagtgcgtagcccagggcagagggtggggtagcttcagatttagtgggcgctgccacacagcctcccaaggtggtcaaatctgtgtatcctcctagcggtggtgactgaggatcttagttgctccacctcctcaccaacatttggtaccgtcagactttttggttgaccttggaacatttttattcttttttcctgcaaaagtaacaccactggttatcatcgggctgagcccctcatgttattttgtcctccccttgctcctgtccattccgactctcacccattctgtggacaggagtcaagtgcttattctttttttttttttttttttttttttttttgagatggagccttgctctgtcaccagggctggagtgcagcagcgcgatctcagctcactgcaacctccgcttcccagatccaagccattctcctccctcaccccctcaagtagctgggattacaggcatgtgccaccacgcacggctaattttgtatttttagtagagacagggttttaccatgttggccaggcaggtctcaaactcctgacttcaagggatccacctgcctcagcctcccaaggtgctgggattacagacgtgagccactgcgccctgcccaagcgtgtattctttgaccagctttgcgctggggcccagcgactgaagggtgaacccaaacaacaggcagccctccccgagctcagtccagtgggaacacagacctcgactgcagagcaacagaaagataagccgggctggaggctcccggcccccatcttcccacagtgaccccattttgggaacaggaacccccatccctcgtcttgtttcgggattaggcttctccaaatctggcaccctatcaccttgactcctctcttgcccccccgccacatccaaagtgtctggaaagcctgtcactctacatgacaatgtaacctggtgctgcgggctcctcttccttgtcactccccttcctcgtcatcccccttcttcgtcaccccccttcctcgccacccccttcctggtcacacctcttcctcgtcacccttcttccttgtcacccctcttcctcgtcaccccccttcctcatcatcccccttcctcgttaccccccttccttgttacccttcttcctcgtggccccctagttcaagccaccctcatctccctcctggaccattgaggcgtgctccctgctcccttctcccccactgtccccacagttgtccgcacacagccagaggtagccgtgcacacctggtcagggcaggaaccctcccctggctccacctctcccagcagagaagcttgcaaggtcccaggcaacctggccactttcctgcctgccctgcttccctcttctcctgccaccattcctggaacattccaggcaggtcctaccccggggcctttgttcttgctgccccctgggcaggcagcaccctccttccttctgttcagtcagcctctgctgacagtggcccccttggggagatgtttcttcccgaccatgggtccccaggagcagcccctgtcaccctccctctagcaccttcccccggtaaccctcatgatggttacttccattatgacatgtgggtctgttggtttattttgtctcccggcataacgtagcctcagggcatgggggtaggggtagaaccacagggccttgccctgccccttgctatgttctcagggattggagtgtggtagtctctcagtaaatgctggttgactgactgactgactgactgactgaactgtagtaagctgggctgccagagcgtctaatggggacccgccctgggtggggcacaccgggaaggttttcctgaggaggaaatgccacttgaaggatgaacttggcctcgactaagggaggaggctgaggcagctgccattgcagaggtctcccggcgggggagtgcagggggcctttgaggaattgaaggaagacaggtaggtcggttcttgggttggtctggattccagtcttgacagctgcttgggcctctctctgcctcagtgtcttcctctctagaaggtggctgcttcaggtgttcctggacattcctgaagttctgctcctaacacacttatcctggtgcctgatacataaatataaatgtgattgtttatttttttccaacaaatttggtggagtgctgacccgtgtggcctccagggatgcggtggtggataaacagacccggttgccgcccatttggagcctggcctctggagccatctggggcacccctgcttggaggcaggagaaggcctggtgtgaccttgggcccggggagtccttattctagatccgggaagctcttcagggtgatgaataggaaagacgaatggagggtttgtgcgtgccggccctgtgtcccggccagtgctcccaagctgctgcctgggcctccctgaaatcccaggaggtagctgcacccgtgtgacccatttcacagattgggaggtgaggggggcaccaatgctaagtccttcgcccattttgcaaactagagtagatctggtggtgtttcctctgtggtctgatgtgtttttctggtagccagtcaggtggggcagctttcaatttgttcttccagactcctgtgaaggaagggccagttcaggtcactttcctttttttttttttttgagacagagtctcactctgtcacccaggctggagtgcagtggcacgatcttggctcactacaacctccgcctgccgggttcaagcgattctcctgcctcagcctccggagtagctgggactacagtcgtgcgccaccatgcctggctaattttttgtgtttttaatagagatgaggctttgccgtgttagccaggatggtctcgatctcctgaccttgtgatccgcccaccttggcctcccaaagtgctgggattacaggcgggagccactgtgcctagtgtcttagccattcctgaggttttttttttttttttgagacagggtcttgctctgtcacccaagctggagtgcagtggttcaagattggctcactgcagcctccacctcctgggttcaagcaattctctttcctcagcctcagtagctgggactgcaggtacacgccaccaccctgggctaatgggctaattttttttatttttagtagaggtggggtttcactatgttggccatcctgttctcaaacttttttttgttgttgtatttttatagagatgggatttcaccatgttgcccaggctagtctcaaactcctgagctcaagccagctgcccgcctcagccttccaaagtgctgggattacaggcatgagccactgtaatgggcatccagcccattcttgactttttgtaattccctttaaatattagacaagcatgttgtcagtgtatgtacgtgtgctcgtgcgcacacacctgacactgagtctcccaatccatgaacgtggtatgtctctccatttgtttatgtcttctcgttcatacttttccagccgacgccttgcccacctcttgtggggtttttcccagggtagttcatgatgtggcagggagtctgtgccctccactcccacaagatgccgtgcaccctgggtttagccttgctggctgaggacctcatggcggtggcaggaggccacttctcccattctctgcttcttccctggtaccgcccctggaccctggcggagggcgggcagggtgcccagaaaggaggctgtaattttcctgaatgatttcaagggctaattaaaggtttgccttgactaatcagcttacggtttaattattagggaacaggctctgggatgcgggaagcagctcagctggggtctccccacagcgtggcaggaaggagccaggacccagccctactctggggggctggcaggatatggggataccccagcaccctccagtgggtcagtggggggttctccatcccccactgagctgtgacaggtggagggcagcaggtgtgatggagattacagccgattcctcccctgattcacatcatcccccacagcccatggctggctggggaggggctggccctgtccctccagcagctttggcagggcccgtccctccccactttcctgcagcaccccagcctcgctggcctttgtggagtgctcggacttcatttattctgtgggtcttggcttaaaggtcagcacctctgggaagcctcctcgggcctccctcctgtcagagctggtgatcagccgcacggccccttgccagttcttgggatcatggttgttcatctgctgcaactcctgcagacactgagaagtacactgagggggatgcctgagctgggccagtgtcggggtacccagcgggataaagggttcgggacctgggctccaaggagggggctgggaaggggtgttcagggaggactgagtgatggcttggaggcggctggaccaggaacacctcatgggagtttgcgaatggggaggggactctggagatggctgtgccaggcctgacttcattccttgcattcctcagcaggccccagactcctgatggtcctaagtgggggaaggtgagccagagagggccttctgggtactgccctccccccactccatcagtctgtctcagtctctctttacaccctcccccatccaggtctcagggctggatccatcctcctgcccactccccaatctccttatcctttggctgcgccttagggtcacccggggtgggaggcactgcaggggcccaagctggaccatttgaagctgactgtacagctgtggggtctgggccttggggttttttaatgctcccctggcgactctgacatgcttctgagctggagtgagggctgctggcctgcaggaatggcaacaaatgtgttttagcttttggcatgttctgggtgcttttctaggcttctgacatggaggggttaagtcacggcacgctacggggacatgtgactgtgattcctgtgttccagataaggcaactgaggcccagagaaggcctcgagcttggcgatggcagtctctgtcactgtcttatcttcccatttctggtctgtccagatgtctgtctgggccttctctgtttcacctctgtctctctccctgtttttctgcctcttatctcccttccccaccccaccctcctgcatttcagcttccctcctcccctggcagaaacttcccagatttctgtgttttgaggcaggatctggctgaagccacagaggggagatgggttctgcaggcccaggacatccttctgaggggaaggatgctgatgtcaccacgctggcctccctaacagctcctgacacgtggagtctggggctgggggcaacacaccatctgactgacagtccaagggtggctagggctggctctgcaagtttgcagggaggactgtccccacgggttgactctgacatgccctgtgacaccagccacctctacggtcccgggagtcctctactgccagttaatgtttcagcttttgtgggtaggactgcctgtcggtcagtagtttaattgcaacaaaggtttgtgctagaaaggcgaatattacattgcaagagcctttattatttgatgggactaggggggactgatagctgatggtcccgtatgtccccactcactgagggatgagggctccccttgcctcctctccccctacccctctccagcgaagggctcaggagtccagctccacctgcagcctctccctgctccggcacagcatcctctgaccttgggcgaggccctgagcctcagatgtttttgagttcccacatctggagcaggaggataatgattcctgctgcctcccagggttgctgggaggatgaagtgagtctgctgtgtgatgctcagaacagggccactgtcattatgccattctggttactagtactcttattaccattacacttattagagaggcaggatccgtgcttggatttagtagttaggattcacagggtgagtgatccataattctttgccattacgatgaggtcacatttcctttggtaaaatgttgaacacctttgtattatggaaatgttcacacatacccagaagaatagtctcgcgccctcctggggtccctgtcagcagctcagcaggtagcagctgtggccaggccttgtcgcctgtgcctgctcctcacctccctgcttatttcagagcaaatcccaaacgtcgtacagccagaaatattccacacttttccagaacaagcctgcctcagtctcctcatgcttccccagttgtcttataatcctttttttttttttgagacagagtctcactctgtcacccaggctggagtgcagtggtgcgatcttggctcactgcaacctccgcctcctgggttcaagtgattctcctgcctcagcctcccgagtagctgggactacaggcgtgtgccatgatgcccggctaatttttgtatttttagtagagatggagtctcaccatattgatcaggctggtcttgaagtcctgacctcaagtgatataaccatctcagcctcccaaagtgctggaattataggcgtgagccaccgtaccctgccataatcctttttcatttgttttttgttgttgttgtttgagacagagtctcactctgtctcccaggctggagtgcggtggcacgatctcggctcactgcaacctccgcctcccaggttcaagcacttctccctgcctcagcctcccgagtagctgggattacaggcgcccgccaccacgcctggctaagttttgtattttttagtagagacagagtttcctaggctggtctcgaactcctgacctcaagtgatccacccgcctcggcctcccaaaatgttgggattataggcgtgagccacggcgcccggcccatttgtttgatttgggtctggacaaggtctacactttgcatccggttgataggcctcttttttttgttttgttttgttccctttgttacccaggctgaagtgcagtggagcgatcagagctcacgtgcagccttgacctcccctgctcaagcaatcctcccgcctcagtctcctgaatagctgggaccacaggtgtgcgccgtcatgctcagatactggcatcagctctttggcgtgcatgttgtcgtagtttttctacaggcgacctaggccatttgtcctggagttttgcagtctggggccagctgatacatccttgtggtgtcattgcacgtgttctctgtctctgtgcttcctgtaagttaggacttaggtctagaagctcgatctgatgcaggttcagtttcttctggcaagcacgctttcttaggtggttgcttggatgagcatcagaattacttacatgtctgtatgactgtcaagttcagttttcaagtaaaaattaagttttttttaaaaaagcgagtgggttgagaagaacactctgaagtcactcctagtaaggctggtacccagatccagcagaagtagggtgggagggaccaaaggactgaggctcgggtccccccttccccaccccccggggcctgggagcaataggctgggtgccccggcttcaagtaaaccagtggcattaacatgtgggcctctggttcctgctttgctagggccacaggcttccagctgagagctgctgccacccaccctggcaaccccttccgcatcgcgtggtggtgacaccttcagaacagagtggtctcccaccccagctctacccttggctgcctgtgtcaccctgggtggctttcccagcctctctacctgcttccttcttgacagcctgatggtggccatacgtcccttgggctgtggtgactgggcctctgggagctgcccttccacttctgcattttaacataaacctccttgacctcagctgctccattctctgctcccttccagccactcggattccagtcctgggggcctcctcactgaccatgccctccaccctcagtgctgttccctggtactctgcatggcttcctcacctgtatcccgtctttgctcagacgccacccctttagagacctccctgactgtgccctctgaaagagcaccttgtcactctctgtcccttctcccacttgtttacttgtatattgtgttcccactagaatgtcaactccaggagagcagagactcttgtcttattcactgctgtgtccctggtgcctagaacagtgcctggcacctgctaagtgcatattaaggagtcgttgctcactgggtagaagcattaaaaaaaaaaaaaaaaaaaggctgggtgtggtggctcacgcctgtaatcccagcactttgggaggcaaaggtgggtggatcacctgaggtcaggagttcgagacgagcctggccaacacagtgaaaccccgtctctactaaaaatacaaaaaaattagcttggcgaggtggcaggtgcctgtaatcccagctacttgggaggctgaggcaggagaatcgctggaacccaggaggcggaggttgcagtgagccaagatcacaccaatgcactccagcctgggtgacagagcaagactctgtctcaaaaaaaaaaaaaaaaaaaaaaaaaaaaaaagaattgttgagtgcatgaatgaataaaagaaagaaaatgactgggcacagtggctcacatcccagcactctgggaggctgaggtgggcagatcacttgagcccaggagtttgagaccagcctgggctatagtgagacctctgctctacaaaacatttttaaaattattgttttaaaataatttaaaaattatttaaaatgtaaaagggcgtggtggcatgtgcctgtggtcctagctactcaggaggctgaggtgggaggattgcttgagcccaggagttggaggctgcagtgagctatgatggggtcctagctactcaggaggctgaggtgggaggattgcttgagcccaggagttggaggctgcagtgagctctgattgcaccactacactccagcctgggtgacagagcaaaacctatgatgatagatagatagatagataagatagagcgagcaagaccctatctcaggtagatagatagatagatagatagacagacagacagacagacagacagatagatagatagatagattagattagatagatagatagatagatagatagatatggttaagtgagtggactttggtcctggtcagacttgccacggaatcccagttctgatacactcgccgtgtgactgagggctgacatgtcttctctctgagcttcactctcctgcttcacacaccgtgtgaacggcaccctcctcgctgccttcttttgcaccaggatggagcctgcacgtaacactttgtagtggtctcactgctgtcctgtctccagcacggggcaccgatgagccagccagaagccgtccctgccggggggatgcttgacccaaatcttcagtaataactccttccactctgggtgaccagctgtggtgccccagggcagggacttgttgatctgggtttgttctggaggccagaagggtttcctggggactgggattggagcaggattgagagtgcctggtatgtggagagacctggctgttgtggcatgagtccgagggctcaggggccggctgcttcccggcctttgtcttccttgcaggaaacaggccaggagttacaaggggccagaggatgctgctgtggttatggtggaagttaacagctttgggaagtgtgcatgtgtgtgagtgtgtgtgtgtgtgcacttgtgctcattgtaaagagagacggtaaagaaatgaggagagactgcaggcacatgcaaatacagagaaagctttcagttgtcaggatcgctctcccggtttttcctgcatggtggtgtaaaatctgacatgtgtacagaaaagtgtgtaaaacctccatgttcagtttaatgaataattataaagcaaacagccatgaaactaccacccagatcaagaagacaggcatcaccagctccctgaaagccctctccttcacctgcccttcccagtgctaacaaaaacattctcctccctttcttttcattgttcctcttttttggtgaattgtgaaagatttcagacacccccaagagaagagagaatcacctgctgaccaccctcaggcccgctgcccagctaaaagacgaaatgcttgctgtgggtgcagcccccaggtgcctcccccagggccccaggcgtcgctggccctgcgtctgcttccctaaacagtgtcccgcattgttctgcaggattttaaactgcgtgtaaatggtacgaggccagcggcacttggctgcaactctctcaatattttgttcttgagatttctctgggtggagtaatgaagctctgtgccagaaggaatggttcccagcgggggtcagggcacccctacccctggccagaggaaagcagctctgtcctgggggggccccaggaggacgctctgggctcctctcacccaggcccgcagccccctgctccacgtgggtttgaggcggccacctccagtggaagtggtagagcgccgttggcttcctagggcaccacataggacccagttacagccgtgatgtgaaggggccctccctgagcttatgtaaggtgtaatggggcgctggtgccgcctggggcctgtgtgcaccacggaggggccttctctggaggagggcatagatcagcagctggggcaggagggcctcttctcttcccatactgccctccccctgcgcccgcccactgcccaccctcacccgccctgtttgccaggctcacacagcctttcttggagaggccctctggcggggagtttactctcaaaggctctatatctagctgacctgggattgccacccagctccgccaccttctagctggacggccctgggcatgtgttgacccctgccccacctctgttggcctcagtttccccatttgtaaaatggaattgtgtgagggttatttcatccatgcaaagccttcgtagaagctagtgtgtggaagcctcttaatgagccttagctgttagtatctttgtcatgcttgccattcattcactcatttttgttgatagtaactttttgcctcctctgagtccagccctgtcaggctgaggtcctgccttcatggagcttataatacagtgagggagacagacatggtactaggcagtgacaaaccagagtgaccttggaaagcacaggccagagtgtgacagctgtgatgggagaagacccagaggactgtgggaggccctggctccagcctaggaaatcaaggaaggcctcctggaggaggagacttcagagctgaggcctgaaagaggagcagggttagtttgcggaacattgtcccaaggagagcaaatagcatgttcaaaggctaaaagttgggaaagggtctggcattttaaataaaccattactatttttaagaaaactttaaattctgagatcattgtagattctcctacagttgtaagaagtaactcagaatggccaggcgcagtggctcacgcctgtaattccaccccatttggggaggccaaggcaggaggatcgtttgtgcctaggagttcgagatcagcctgggcaacctggggagacaccatctcttcacaaaatagaaaagcttatctggctgtgatgctgtgcacctggagtcccagctacttgggaggccgaggtggatcacttgagcctgggaggttgaagctgctgtgagctgttaatggcaccactgcactccagcctgggcaacagaattaaggctctgttgcaaaagaaagagagaaagagagagagggagaaagggagagagggagggagggagaggggggaaggaaggaaggagagaaggagagagggagaaaagaaaagaaaagaaagaaataatacagagaggaggtctggcgcacctttacccagttttccccaatggtaacacctgcgagactgtagtaccagataccagagtgtcaactgacattgacactgtcattgtcaattgacaattgtcattgtcaattgtcaatgacaatgtcattgacattgacattgtcagtcacaaggatccctcctaataccttctcatagctacacccttcccctgcccatccctaacctctggcaaccactcatctgtctattcccccattgttaggattttgtcaattcaagaatgttatgtaaatggagccacccagtatgcaccctttttgcattgactttatcccctcagcatgattctctggaggtgcatccgcattgtggtgctgatagtgactactgagtagtattccgtggtctggatgccccaccgtttgtttaaccatttcccgttggaggacatctgggtttttctaattttttggctattacagacaaagccactataaacctcgacaaagagggtttcgtgtgaatgtcagtttttgtttctctggggccaatacccagaggtacaattgctgggcagcgtgctggttgcatgttttaagaaaaccatcaaaaccattttctagagtggctgtaccatgttatattatcaccagcagcaggttccccacatcctcaccagcatttggtgttgtcactattttttattttagctcttctaataagtgtgcagtgataactcattgtggctttaatttgcatttctctaatggtaatgatgttgattagcttttcacgtgcttatctgccatctgtgtatcctcttcagtcaaaggtctcttcatgtcttctgctcattttcttattggattgtttgttttcgggttttttttttttttttttttttttgctgttgagttttgagttttcactgttgttctttttttttttcttagccccaccaggttctcatatgagatctttatctattctctctcttttttttttttttttagatggagtctcactctgtcgcccaggctggagtacagtggtgtgatctcggttcactgtggcctccgcctcccgggttcgagcgatttttctgcctcagcctcccgagtagctgggattacaggcatgtgccaccacgtccagctaatttttgtatgtttagtagagacggggtttcaccatgttggccaggctggtctcgaactcctgacctcaggtgatccgcctgcctcggcctcccaaagtgctgggattacaggcgtgagccaccgtgcctggcgagatctttattctacatactagtcttttgtcagatacgtggtttgcaaatattctctcccagtttgtagcatgtcttttaatacttttcatacggacttttgcagagcaaaagtttttaattttgtattaatttttttcttttatggattgtgcatttgctgtcaagtctcagaaccctgtgccctgtcttaggtaccaaataagtttcttctgctttttttttttttttttttttgagagagagtctcgctctgttgcccaggctggagtgggctcactgcagcctctgcctcctgggttcaagtgatgcttctgcttcagcctcccaagtagctgggactagggaggcgcccaccaccatgcctggctaatttttgtgtttttagtaggcacaggatttcaccatattggccaagctggtcttgaactcctgacctcgtgatccgcctgcctcagcctcccaaagtgctgggattacaggcgtgagccaccacaccctgcctgctttttttttttccataaaagtttgatagttttacatttaagtctgtgatccattatgagttaatttttgtacaaagtataagttttggattaaacttctttttttcccccgtttggcatgtggatgtccagttgttccagccagcatttgttgaaaatgctgtctttcctctgttgaattgcttaggcttctttcacaagaatcagttaccacgatgagatactacatcacacctactaggatggctgctgtcaaaaaaacaaaaataacaagtgttgggaggatgtggggaaattggagccccgtgcattgcttgtgagaatgtaaaatggtgctgtcgctgttcggcatagaattaccttgtgacccagcaattccgctcccaactgttcgtccaaaagaattgaaagcagggactcgaacagatatttgtacacccaggctcatcacagcattattcacaagagctaaaaggtggaaacagctccgtgtccatcagtggatgaatggaggaacaaaagatggtatacatgatggaatattattcagccataaaaaggaatggaattttgggtagaaagctatcatgtggatggtcttgaaaacattatgcttagtgaaatcagccagacacagaaggagaaatcctctatgattccacttgtacgaaggacctagagtaggcaaatacaaagagacagaaagcatgcatggagtcccagctattcgggggcaggaggatcacctgagcctaagaggttgagttcagcctggacaacatagtgagacccggtctcttttaaaatatatgtatataggccaggcgcggtggctcacgcctgtaatcccagcactttgggaggccgaggctggcagatcaagaggtcaggagatcgagaccatcctggctaacacgatgaaaccctgtctctactaaaaatataaaaaattagctgggcgtggtggtgggcgcctgtagtcccagctacatggaaggctgaggcatgagaatggctagaacccgggaggcggaggttgcagtgagctgagattgcaccattgcactccagcccaggcaacagagagagactctgtctctaaataaataaataataaaatatatgtttatgtatatatagagagaaagaaagtagaacagaggttatcagggtttgaggggaacaaggagctgttgtttattgggtacatagtttttgttggaatgataaacatgtttgaatatagatggtggtgatggttatacaacattgtggatatatttaatgccactgaattgtatacttacagatggttaacaatgataaatatgctgtatattttaccataataaaaataaatttttgaaaccagctaggtatgttggtgtagatctgtttctgagttctctgtcctgttccgctgctctgttgctgtgactgtcccaccccatctgggttacttgctgcagcgctgggagagggattcctctggcttcctctctcttttctctttttcaagattgagctcttgaaaaaagagctctgggagctggcattttggagctcctctagggttccgcgtgtagaagatggcactgtgttgggcctaggttcagagtcgtccttgacaccacctcatcctcagcccgtgtctgactcatcagcgagcattgccttttcttggtagacatagcccaggtctgtccccctctctccactgccactgtcctggctgcctcacagttgcccaaacagcgctgcctccttgtcactcatcctcacgcccactcaggccccttgattccgtccttcacagggcaaccaaagttacatctgtaaaacccaggcctggaccaggtggagtggctcccacctgtaatcccagcacttggggaggccgaggtgggcagatggcttgagctcaggagttcaagaccagcctggacaacgtagtgagaccttgtctctaaaaaaaataaattaataaaaattaaaaaaatgtaaaaacccaggcctgtccttggcacccacgttgtctccccttgctctctcatgatctgcctccaccacaccgtccccgttcaggcctgctgcccacccatccctccagccagtgtgtgtccgctggactttcacattttttgcgtgtggtgcttgactataagcctgatggggtagggcccacactgcacttctgcccccgcacaggcggcacgtgacagacgtgcattagatttctgtcggtggacgccatgaacgtgggaaggaggctgcctgtggccggagcaggtggttgggggcggagagtgtgcaaaaatgaggacagagaggtgggcgcgacctcggtgaggagacggctttagctctgtgggcctgagtaggtttttagcaggagaggatacaatcagattagatttacaaaggtctccctgacctagcagaaaaaggcaaaggctttgaatagacacttagcggaagaggacattctgatggcttttataaatatgaaaaatgctcaaccctactaaatagaaaaatacaaatgaaaactaggctgaggggggccacacctcacatatcagcagagatcagagagactggccacgccccgtgctgcaaggccgaggggagataggccctggcaccgccgaggggctgtgagtggggacaggcctcacgcagggccacttggcagtggtgaacttcactggacatttacccacagacaaacttgcacacctgtgaaatgacagctgcacacagtgagtgttgccgcaccatttataagagcaaaagacaggaaaccaccactctggcccgatggggactggctccagacatcacggtccttccacacagctgccaaagcagcaaggcagtgctctgccaagatcaaggcagggaaagatcaccaagacccacatatatatgcagcatgtctgtggtttcagttacctgtgaccaaccatggcccaaaagtacatggaaaattccagaaataaccaattcatatgttttatttatttatttttttgagatggactctctgtcacccaggctggagtgcagtggcaccatctcagttcactgcaacctccgcttcctggtttcaagcgattctcccacctcagcctcccaagtagctgggattacaggcatgcgccaccacgcgcagctaatttttgtatttttagtagagacaaggtttcaccatgttggccaggctggtctcaaactcctgacctcaaggaatccacccaaagtgctgggattacaggcatgagccactgcgccggcccaacagctcatacattttaaattgtgcaccattctgagttatcgtgattttttttttttttgtagagacgaggtctccctatattgctcagctggtctcgaactcctgggctcaaatgatcctcctgcttcagcctcccaaagtgctgagattacaggcaggagccactgcacagcctcgtgatgaaatcttgagccatcccactctgtcccgcccgggacgtgaatcacctttcttaccccacatatccatggtgtatgtgctacccatctgtggctactcagtagctttctcggttctcacatccactgttgccgtatcacagtgcttatgttcaggtagcctttatttcacttaacattgtccccaaagtgcaagagtagcgatgctggcaatttggatatgccaaagagaagctgtaaagtgcttcctttaagtgaaaaaggggaaagtattgaacctaataaggaaaagaaaaaaaattgtatgctaaggttactaagctttacagtaagaacgaaccttctatccatgaaattgcgaagaagggaaagaatttgtgctgggtttactgtcacacctcaaactgcgaaagtcaacagccacagggcataagggcttggttaagatgaaaaaggcattacgtttgggggggtggaagacaggaacagaaacgtgttccaactgatggcaatcgggttcaatgttatccacagtttcaggcatcccattgggggtcttggaacatacgccttgcagataaggggaactgctgtatatatagttggccctgggtatcatgggccctcaggatcacgggttctgcacccacccattcaaccaacgaaggactgaaaatttactatggagggccagcttttccatccgcggttatggagggctgactgagggacgtgagcatccctggatgtggtacctcctgcgggggttctggagccaatctccctcagctaccgagggagaattgtatagatatatcaatttttttctttcaaatcataattataaattgttaggatacacagtgaaaattgcataaaacataaatgtatagcaaaaccaattactataaagggaaaaatctatgtagccacccctccaggtgaagaaacagatggtgccagcctcccccaacccccaaaagctcccagtccctcccttcccccagaagcatccactctttttaattttaattttttttgagacagagtcccactccatcacccaggctgaagtgcagtggcacaatctcagcttactgcaacctccaccttctgggttcaagcaattctcgtacctcagcctcccgagtagctggaattacaggcatgtgccaccacacccggctaatttttgtgttttgttgttgttgttttatttttttgaaacagagtctcactctgtcacccaggctggagtgcagcggcaccatctcggctcactgcaaccttcgcctcccaggttcaagtgattctcctgcctcagcctcccgagtagctgggattacaggcgcctaccgccacgccacgccaatttttatatttttagtagagacggagcttcaccatgttggtcaggctggtcttgatctcctgacctcaggcgatccactcgccttggcctctcaaagtgcagggattacaggtgtgaaccaccccacctggccttaattttaattctctaaaaatgtagagatggggtttcacaatgttggccaggctggtctcgaactcctggcctcaagtaatcctcccgcctcggcatcccaaagtgctgggattacaggcatgagccaccgtgcccagtccaactctcctgacttttgaggccatcatatgcttgcttttctctctgtttgccacctctgtatgcagcctgaagcagtttccttttgcctggctttgaaccttaaagtccgaggatggagtattgttcgatgtttttgcctcttctgtgtggcgtcttctttgatgctcatccacatgtagctgtagtcattcattcattcattctccctatcatgtgcggtgccatggagccttcattcaccacctcctggggacgagcatttgtcttgtttctagtctcttctcgcgtgtgctccctgccccatgggcctgcgttatgctggagtgtgtacccaggagagctcttgctaggtcaagcgtgtgtccccacttccactcgatgctgctaagctcctgccaaatgccagcagcgtgggagagccacggaatgttttcgagaagagcaaagtacagaatattgtgtgtcatgtggctgccatttctcttgtttttttaaaaagcaggtaatcatgtgtgtacccatacacacacgtaggatctctcagaaaggaaaagaaaaaacctgaaagtctagtagcggttgcctccagggctgagctgggccagggtggaaggaggacatcctgtcacagtttaccctttggtgccttttgtcttttgaaccgtgtgcctgtattacaaagacagagagaaggaaaagaaggaaaaggggtagatgagtgtaaatgtggtaaagtgagaatcactgagaatcgcccagtgcagctccctctccgtccattggggacctcgtttcctgtggctgtccagagctgtccaatccccatccactccccgccagagcccaaacctgcccgtctggtttgcagagctgccccacgtggctcctctgcgggtggttactcgacaaatgccccaccccccaccccatggggaggcagtggcctgagatctgggacttctggatctaggcccctagacctgccctgctgtggtccagagcctggcccagcccctccttggacttcctcctcactgtgacagggggtggacagaggtggggatgggagttccaggccctgagagcaagcgctggcctcccagcccacgttctgtgtgtggagataacatctgcccttgaggagttggctgcaggggcaggggtgtgccagagcagggtagtgggaaggacccaggtgcgtctgtctgctgtgtgccggggcgcttgctcactgttgtccctggattcaccatggcctgggtgcccatcctgggtccgggcacccagcagccttggtccctaccgcctaccagactggagtccctggtagagcccctctagggtgtcaactcccgtgggcaggaagttttgtggagtttgttcagtgctgaactatcagggcctcccacaggtgtgcctggtatgtgcctggagctcagtgaatgaatgagaggcgggcaagctgcagacagtgacagcctgggtgctcagggctggcatggggaggtgcagggtggagtgcacagggctggagcccagaggatacctgacccagcctggggtggcagggagggcttcgtggaggagcaggtgcctcaagtggggccggagggtgagaagggatgaaccaagcagccctccggaggcctcgaggggaacagacagtgttcacaggagaaacagttacacctgcgagctctgcctcgggccagcctttgcactggaggtgggatttgaaggggagggaggggtgctgtggagcatctttttcttctgttcctgaacgggggttctgatcacatcagcctcatgcttggagcagctggttaagggcacagacaccgggacagacatccagcctgggagtcccagcgcctgacctcccctcgggcatcaagtcactccgcctctccgcgcctcagtttcctccatgatgaaaggggcctgctgaaggacctgtctcatttagggcagcagtgaggcaaagccccggagcccatgcctgtgccaagagcagggcctggcccagaatatggccttgtcacgttgagctgccttttttcagcagggttagtttcatcctggtgaggcggcgccagcatggcgttccaccttcttggcctcctctccctcctccctttcctgccatccacacctcccggccctattctcacacctcaggatggcgatatgggggcttcaccgtggtctcccctgacctcgcccctcccccggtcaggctaagtctcagattcctcctcatgggtgaggggggcagagtggcccctttcctccagcccatgctgggcacttgctagaatcccagccttggtcggggtggaggagaagcaagttccagctctccagttctgcctccatatcagagagcccacccacccctctccccagggctctatcctgcacctagtggcccctgtcactccccagccacccccacgtacataccctggtcccttgtttcaaacctggctgccccttagccgcctggccagccgcttgcaggtactcagccttgctgtgtagtcaccccctccagcccctggcacctagcctggcataggggggtgaggcggggtgtgcctgttggtgggaggctgaccctgctgaagcaaaggctgtggttggggtccccgcccagccctgccctctgtccaggcagctatgagccacgtggcccaggcccacccaccccagctccaggcccagccccgcctccctcccgccctccgtgggtggaaaccacagccgaggctcaactcctggccgcgtcaccaccgctgccctgcaggctggagcatagagcccaggcagccctcctcggtgggtgcccatgttgagggcctggggagccctggatctactctgctttcccagctggaagcctgtctgtccacaggcccgccccattgagggtggcccaggaagtgggaaagagcgtggtggaggtgagctggccaggcctcgggaggggagggggagggctagactggctgccagggaaggagggtctgcccctggccactggagccagtgtgagcatgtgcgaaggccacacctttcttggggttggagcggggtcactgtgtttccatgtgtgcgagatggcaggtgcctgtctgctggggacttgcaggcatctgagcataggtccctgagcctctctgtgggagcacgctcctggggtctggcttgcacgagggcagaagtttccgtgagactgtgcctcactcagtcactctgggtgaccctggagttgactgggtgtgcctaggtccatggaggtctccttgcctactgtgtgtggttttggggtcgggggggtgcctcctagtgtagctttgtatcttgggggttattcctaggtgcgtgtgtgtcctggggtgcagtgcggctttccctcgaagtcatggagtgtctgcggcattgtgtgtatacacacgtgtccctgtgtatctatgtgtggatctctttgggagtctctgcatctctgggtgcacgagtctttgcagtgtgtatgaaagggtcgcagtccacggtccatccatggctcttctggggcccatgtgcaggctggctgagccgcggccttcccatttgctgcgcatgtactctgagccaggctggctttaagagccgctcccccaccttctcccactgaagtctcagaagctccctctggggcacgctctgctggtgccccatattctagagacatgaacggaggctcttggtaaatgtccttttcccctgccccacggcaagcaaggcactgacccctggccaccagcctcctgagcccatggtcctgtacgggccgccgcgaggtgctcaggatgttgtagggttgagggtggattgctgctgttgccggctagccgggaagttttctttttttggcctaagataaatattggagaagaatggcccgggagctttccatgtgaccagttcatgtgcctggaggcctgtggtttgtgtggctgggtatgtatctgcatgtctgtgtgatggtcttaggactcggctctatgtggtgtcagctgcggacatcttgcatgctctggcatgtcctcacatgcatctgtgtctagggatcatgcatgtgtgtatgcatgtgtgtgagtgtgcatgtatgtgagcatgtatttgtgagcgtgtgtgtgagcatgcatgtgtgtgtgtgcatgtgtgtgcatgcatgtgagcattgtgtgagtgcgtgcgtgcatgtgtgagcgtgcgtgtgtgcacatgtgtgcatgtttgtgagtgtgcatgtgtgtgagcgtgcatgtatgtgcatgtgtgggtgtgcgtgtgtgtgcatgtgtgtgcgcgcatgtgtgagcatgcatgtgttgcgggatggcttcgctcgctgctgtgtgttgggtctgtgaggagaggccgtggttgctgcctggtgtatgtcctggcgtctgtgcacggccttgtgtgttgcatggcaggggaggtagacagtgagagggcttgggtgctggagcctgagaggggcagggcctctttcctgccacatcacccccttccccctgcccagcctcaggcgaggaataaatgacgtctgctctgatttcccaggccgtatgggctcccacacactctctgttgtggtgtccatccccaccctgagtacctctggggggtgaagggcaccagcagtgccctttgtgtctgtgcccttttgtgctgggccagattcggggcaggagggcttggccctggcatcactgggggctctgagcgccagcctgggcctagctgggtaaaggaagcatcatctcttcgttgagccacactctctgcgctgggcaagcctggggacacagagatggccccaggccctgccctcctgggtctcccagtccagtgggagaggcagacctgttatcagacaataacagcccatcaggctcctccctcccaaccctggagaaggtaagactagcatatttgctcggcagaagggaccatgcccggcatcctctgtagtgtgtttgttcattcattcattcatcattcagcagcaagaatggcagtaatgataacagcagcgagcctgcagtgaggccccactcggcaccagtcactgttgtaaatgttttacatgtgtcgtcttattcgctcgtccaacatgctcaggaggtagggactatcactacccccagtttgcagatgaggacactgaggcccagagaggttgagtcacttgtccaggggcacacagcttggagtagtagagccagtacctgggactgggcagtcggctcttaaccaccagtacaggcctgctgagcccctgtactgcgccaggcctctgctgaggacaaagcagtggctaggagagacaggccctgtcctcgtggggctgcccgttcattgcaggagacatactaattaaggactataaggacaaaggtaaaattacagctgtgacagatgctgtcaaggggaaggcacgggacatgcagggtttttttcagacagagtctcactctgtcgcccaggctggagtgcagtggcgtgatcttgactcactgcaacctccgccccctgggttcaagtgattctcgtgcctcagcctcccaagtagctgggactagaggcacatgccaccacgcccagctaatttttgtatttttttagtagggatggggttttgccatgttggccaggctggtctcgaactcctgacatcaggtgatccacctgcctcggcctcccaaagtgctgggattacaggcatgagccactgtgcccggccatggacctgcagtttgaaggaagaggaagggataacaaggtgaaggttgagggggcagggggctcttcaggacccaggctaagggcacagtccatgcagaggcctggtggcggggacggcgctatacctggaggaacgaaggagagcagggctgccccctccaccctccacagacgctgctgaatccaggccccacttccaaaggcgtcccccccactggatctgtgtctttatgggcttttacccattgtgggggctcatggatttccagaggcaccccccatgtgatttggcttttgccaggatacgctgccacttcctgagattcccagcgtaggccatgtggctgggtgggcccccctgcagtggggagggcctgggcgttcacagtgggggtaccttttgtggtgctgggacacacaccagcttacttgctgaacagccagattcagtctctgaagacccattttctccccaggcgtcaaggtcagacttccagggagtgagtgtacgaggcccagggacttgtgtctgtctcggccccatccccgtgccctgcgcctcctcagggaccaggctcattactttggtaatggcatcacccatttgttccacagatatgtctcgagcacctactgtgttccagccactgctctagatgccggcaagaaccagacagacagacaggtccctgccctcagggcactgacattctgctgggggcactgccagtcagtaggtgtaggatgccagggggtggtaagtgccacagagacataaaaagcgaggtgcacattttgttcaggggtcaggcagcctctcggaggaggttttatttgcactaagacctgaatatcaagaaaggctgagcagtgcagttctggctgagggaagataggtgcagaggcccggaggctggaacagctgtgatgagtccaagacatacacggaggcagccagcgcggctggagagaagcgaggggaggagatgaggtttgcgaggttggcagggccctcccagtcagggccgtgttgaatcagtgtttgagccaaagtgggaagccctgtagaactgtgtgtgtacatttgtgtaatgtcttcagattcccttctaaccacggtggcttttctggtcttggtctggtcattgtcagggacattgtcccttcctgtttttgtcccataaacctccaaggtcctttctttagagtggaggccttggctggagccgggaccactggggaacaggaggctgggggatgttgacttgccttctctgtgggacagagtggctgcttttgtgacctggcactggatagccctgggcagtgagttcccctctcggcctcagtttcctggtttggggaacaggaaggaagaggactccccacccagcacccagcactgtttagagggctccgcgtggcctggtctgtgtgcctggcacagcctgggcaagtccacagccacgaaggggagcccttgtgagtccacgccctgctgtaggcactgaaatgcagccatcatgaaccaaaacgcggtccctgtccatatgagtcactgacttagcgaggaagatggccacagacaggcaaacaactgtaatgtgtgaggcaacgctgagggccctggagggaacggacctaggctgactgcgccaggctccgcgccaggtgctgggggtgccacatggagcaagaccaggccaagcccctgcctatgagctcacgctgcagccctcggccagtcctgccacctccacctttacagtgtgcccagaacctgctcatgccgccccctctgcagcccccacaaggtcctgcccccttgatttccactgggccatcacagcctcctcctccctggtccccctttccgttctgcccccacagactgttcccagccagtgggagcctgtgaactcctgagtcaggcggtggccctcctgggctcagagacccctgcaactccgtctcactcgggaaaggaccaggccctcccggtggcccccaaagccccacacgatctgccccattacctccttggcctgtccttccacttgccccctcgcccaccctgctccagccacgtggcctcctcgctgtcccttgaccatatcaagcaaattcctaccgccctggctgttccttcctcctgggctgcccttcctccagagccctacatggctccctctcccctcctcacgcaggtccctgctcacgtgtccccttctcagcaaggcctgcctgaccactttattttataataatagttattattattattttgagatggagtctcacactctgtcgcccaggctggagtgcaatggtgcgatcttggctcgctgcaacttccacctcccaggttcaagcgattctcctgcctcagcctcccaagtagctgggactacaggcgcctgccaccacgccaggctaattttttgtatttttagtggagatgggatttcaccatgttggccaggctggtctccaacttctgacctcaagtgatctgcctgccttggcctccaaaagttctgggattacaggcataagccactgcacccagcctgttattcttatttttgagacaaggtctcaccctgtcacctaggctggagtgcagtggcacgatcactcactgcagcctcgacctcccaggctcgggtgattctcccgcctcagcctcctcagtagctgggaccacaggcgcacaccaccacacctggctaaatttttatttattttttatttttggggtagagacagggtctcactaggttgcccaagctgatcttgaactcctgggctcaagcgatcctccctccttggcctcccaaagtgctgggattacaggcgtgaaccaccgtgcccggccttgaccactttattgagaattccagcctcccctcccctcagctcctttctgattgctgcgttattttctatgtcagcatttctcacccgacttagtagatgtttttctgatttatctcatacattgactgcctccttccttctagaatgtgagtgctgcgaggacagggatgtttctgactgttgggtgcactgctatgggccccaggcccagcagagtcagcccttggtagacatggacgggtgcgtgggtcgatgcgtgggtgggtgtgatcgggtcacttgtgggtggagtaggtgtttgctaaggcagactctggggatgtgtcggtcccaaacctgaggactccttggaggaacgaggctcagtgtgggaggcctgaagagagatgtggttagaggagggttgggggccgtgcaggatgggggcaagagctaagccaaggtttggaggcaggaatggcttgggggactcaggacagcgaggagcctgctgtgccgggacgggaagccaaactcccagcgcctccaccatcaaagcacatgccagaaggtaggaggtaaactgaggcagggaggggccctcccagagctggtaggtgaagattgtggcagggtggtgagtgggacccaatggtggaaggctgagtgcaggctggaggcagtgagcggtctgggtccccttcctgattcgagtttcattttggtaacgatgaaaggatgcctgtggtcctggccacctcccctgctctgcccctgggcccctgtgttctgggtgggccagccccctcccttccaggggcagcagctttgatcagagcctggagggggcggggcaggaggtaagggtttttgcacgctcacgtctgctgacactgacagctttgtcgcacggtggatcttgcttttccatttgggccagttaaccttgtgggggagaatgggggtggtgggacccttttcctcccagaaaaggtcagaggatgcagggggtgactggaaaatctgaagtgtctgctaggccaggtcaacgctgcctgtcccgcatgttaaagaattcaaaagattttttaaaatttgaaataaacattttagagtaggatacaaaatgcgcttgcatttctgggatcaaatactggacttcagaggcatctgtgccccggctggggcagaaggctgcaccttcctgctgctctgggactactgcccccaggtcccagctgcttatctgaaagatttcccgggtgctgctgggccttgtccaaggcctctgagcaggggaataatgcagcggacagggacgatcattccacggagtccctactgtgtgctgccctgggctacgagggggtaagacagaggacagtccctgccctgtgaagctgacacattctaagggagaggcagatgctaaagaattacacatatggctgggcccggtggctcacgcctgtaatcccaacactttgggaggctgaggcaggtggatcacctgaggtgaggagttcaagaccagcctggccaacatggtaaaaccccatctctactaagaatacataaattagccgggtatggtggcggacgcctgtaatcccagcttcttgggaggctgaggcaggagaagcacatgaacccactaggcggaggttgcagtgagccaagatcatgccattgcactccagcctgggcaacaagagtgaaactctgtctcaaaaaaaaaaaaaaaaaaaaagaattatacacacacacacaagcacgccatatatgtggtaagagccctgaggaaagataaagcagagacaggtgtagagggcgacaggacaggagcagggcttgtgagcacaggcgggcctgggaagtcagggaaggtgggagatcagtgagaggagagttccaggtggggcactcgcccatgcaaaggccctgaggtggaaccatgtctaggatttgaggaacagcagggggacctgtgtggccagggcacagtgagtacaggggtgcttgggagaagaggagggcagcatggtgatgggcgcatcctgtggggactctcaggccacgaggaggcattttgggggccagcaaagggtttaaggctgtgaactctggagtgggcaggactctggaatgggcaggactctggcttccaggcccagctctgctcggtgagcttagtgagagattttacctttgtgagtctctgtttccacagctgcaaaatggggctcagaatggccactccaccgtggttgagggcgcctgcgagctcagcgtcagcgtctgctctgggccatgggtcccttgtggtggtggcgatggtggtgggagtaccgagctgagcctcaggccacatttggtgggaggggttggttttaagcatctttcctgctgcacaggcccatgggaaaggctggtgtacagccattggggaggtgggggccccggggcccactttgtgcttcctcccactacccgtggggtccaggacaggtcacacaggagggagggaccctcactcagcagagactaggcaggagaggaaaggcaaggtctgggtgtagacagaaagaatgggaacggagggagaggggaggccaggaccagccttgagaggatgatgatgatgatgataataataataataataataataaggccgggcgcggtggctcacgcctgtaatcccagcattttggaaggccgaggcaggtggatcatgaggtcaggagatcgagaccatcctgcctaacacagtgaaaccccatctctactaaaaatacaaaaaaaaaaaaaaaaaaattagccgggcatggtggtgggcacctatagtcccagctactggggaggctgaggcaggagaatggcgcaaacccgggaggcggaggttgcagtgagctgagattgcaccactgcactccagcctgggcgacagagcaagactccctctcaaaataaataaataaataaataaataaataaataaataaaataataatagacaaaaccaacagtgtcacctcagccctccagggcagcaggacaggcaggtaagagcccagccttcagtgccttccatacacaaccgcccaggttcaaatcctggctgcttctcatgtctgcctctcactggctgcttctcctgtccatgccctggacaagggccttcccttctctgggcctcagttttcccattcatgaattgggatgaggatgcttgtgaggatggaacgggattagacgcacagcagggccggaacccgcgaatctctgcagacaggcctggagtctggtgtccactctgccaccctagctgggccacctgggttaatgaggtccccctctgtgccttgttttccctgtctgtaatccggggcttattaatggcccctccctccaggatcatatgtgggactccgggtaaagtgcctggaagagggctggtatacagtaggtactcagtaagtgctggctgctattggaatggtgaccggcacttactgagcacttactgtgtgtgtgatttgccttggttctgatcccaaccactgtctctgggccaggccctccgtgccctctgttctgcgtaattccttataaaaactccaggaaggccaggcgcagggctcacgcctgtaatcctaacactttgggaagccaaggcagatcactagaggtcagaccagcctggccaacatggtgaaaccccatctctactaaaaatacaaaaattagctgggcgtggtggcaggcgcctgtaatcccagctacttgggaggctgaggcaggagaattgcttgaagccgggaggcggaggttgcagtgagccaagatcgcaccactgcactccagcctgggcgacagagcaagactccgtttaaaataaataaataaatactccacgaagcagctactattatcgccgtctttgaacagaggaggaaactgaggcacagcgtggctgagttgctcacccagggccacatattgaggtccccaggttgggttagagctccagttcacagacacagaaagtgaggtcatatagggccagtcgtggcagccctgctggggtttggagccctaggcagcctgactgccaagcttggagctggcctgggagcccagcccccacccttccctccctgcacctgggcaagcccagcctttctgcctagctcttctccctcttcccaggcctggcacggcctctgtggcccccatgaggtcaggagcatctgttgggaagggagcgcctgctggggaagccggcagggcttggagctgcacaggacggcccagggtggggtccctgcctggtcattataaacatgttcagttcctctgtttgtcctgccctctgtgcagtgcccagagggaaggggtggccccaggcaaatatccggaggcgtgccccttgcccccttcccttgggggtttatgggtgggagggcaggaggccaggcgtcggaggacatcccccagaccccatgctgccagctgggccagccgcccgccctccaggctgctcttgccccgtccccaggtgtcccccacctcagggtctgccccgctgtccgccctccgggcttagtgaggggtcacatggctgatcctcttcccgtggctctgggaactgcctagtgccccgcagtggggagggagcgggatggggcggggcgacaggttcacgatgaagaggcctgggctgggcatggggccaaagggggtggagggacatctgggaggacggagaggccggaggacatgggacgcagatctggaatgacagcaggcagagtgggcaaatggggactgttggggtatgtggatgaccctgggagctgggcctagaaagccatgagagagtaggtcagggccaccaggggtgggctgggctggaaggccacgagggaggggtgggcagcactcagggcgccagcattgggctcagagaaggggctgggcagagacaaaggaggccccccgtccgccctccatcctgggccccagggcaagcagggaaactgggccaaccctgggagccttggccaggcccggctctgaccacccgctggcctcttgggaccagctgagacaggttggctgccgggcccccacccccctcccacggggctcccgctgccaaaccggttcccctggctggctcccatggatggtcctagctctgggcagggcctcacctttcccagctgctcccaggaaggcagcctgagccgggaggagaagtaggtgtggaggggctacgtgcatctgcgcgtcctctgtcctctcactagggctacaggacttgctgtgccacgcgctgtgccaggcgcgggggagccagctgggacaagacagaacagaaactccacctgcatgtcccctcgtcccctggtctcaactcttcccctcttcctggaagccttcctgctgcccaccccgcgtccctccagactgggtcccgtgctcccgtcccccagccctgaccaccctgggcagctgctgcatggggacaggtctgtctgccccacacgaatttcccatgaggtcaaaggctgtctgggtcactgcagtggccacagaggaggcccattgctgagttattcccaaatgaatgaatgaatgagtgagtgaatggatgcattcctctcattttacagatgagtaacccgaagcccctagaggagtggtcacctgcctgagggcacttctgtcccaccagcatcagaccaggtgtgtgcaggtgtgtgcgactccagggcccaggcccggggcagctggggtggggccttaggggggagcaggacctgggcccctcctcccacaggcactgtgggagccgccccagccatcacagtggtccccaccgataggccccccatatttgcccagccctgcaccaagctctttgctcccagtcacccattacccctcgcagcagccctgtgggggttcatccacagcacagagaggttgtcacctgcccaaggtcacggcagcatgtgatggagagtcgaactctggcctcttggctccccctcccatctttctccaggctctctatgggatgccgccatcagaatgtctcttcctcagcccctttgttttttaaagtggctttggtcgaccatttgctctgtgcttggtactgtgtcaagggcccgattgaagaccacagatcctaaagataggggagtgtcgcgacaaggctgcctggggtgccctcttaacccaggggatcagtaaccctgtgctgagtcaatatccaaaggtgtgggcgtccccagcccagactcatggctggaccagtggcagtggccaggccatcagtgaccgtccatccagtacacaccatgtaccaggcatagcaggggatgtggggaagcggggcagacgagacccagccagaatgtggcactgacactctagcggtgcggtgtggatgctgcactcatgaacctaagaaggaacaacaaacaggatttccatgagttccgggctgtgactgtgatgtagagcggggggacggcgggacacggggctctttgccttggggtggtcaggaaaggagtcactgctgctctgagaactgaaggaggggacggggagccctgtgcagacactgggaagtgagctcctggcagaggggccagcccgtgcaaaggctctgaggtctccagggggggtgagaacagagaggtgatggggccttgtgggcccgcaggagacagagcggcaggaaagttctgagcagagggacgtgaccgctcgggtgctcacgggtaccctctggctgtgtgtgccacacagatgggcgcagggggtgggcagggagacccagaaggaggctactgcctcctgttggtcccggtgtaagatgaggatgggagggacagagcaggggcagaggaggaagagacatgggcaggctctcactcacccaccgtgattccctcccgcaggccgcaccgagtccccggcaccatgtttgggaagaggaagaagcgggtggagatctccgcgccgtccaacttcgagcaccgcgtgcacacgggcttcgaccagcacgagcagaagttcacggggctgccccgccagtggcagagcctgatcgaggagtcggctcgccggcccaagcccctcgtcgaccccgcctgcatcacctccatccagcccggggcccccaaggtatgtggcacccaccaccacctcccccagcccaccccaacccccgagtggccctggccctcaaccccacactcgaccctgtgaccgacacctcctcactgacatggaaatggagacaaaccccagccttccacccctatcctgggtccagtgctggcctttcaccctccacccactggctccaagtcctaagaacccatgccaccccaacctgagcctcccccacggcccatctgacagcccccacaccagcctccaagctctgctgtctcccgcagactcatgtcccgggggccatgctgctgtaccccggaccacactcctgtctcacccaaccttgagcctttccagagctcctggcagtggaagacagacccattcccagagggtgacagccccaagtggtcagggcttgggtgggggagcccggaggaggcacctgacacagaccaggggtccaggcaagcttctgggaggaggggacaccgaggcagagcccagggctgaggaggaggaggagaaattccagcagatgctggggaagccgggctttagtggagaaaatcactcctgtgaaacgctgggggctttttggttttgggtttttttttttcttcctgccatctagagcaaaatggcaaggttgggatttgaaccaatgtctgtttccaaggcccgtgctcttaacccctctgctgcctccatgtgaaatcataagagttgtggagccggtgtctgggtgtggcctggcatgaggctggcctggcctgagcccgtgctgggcctctgaagccagccttggagcctggactctctcccatggtcagtggggaccaggaggggccgcaggccaaggggaactcggccaggtttgcatccagcgggtggagatgggtgtgcctggggactcaccctcccggtgcccagcccagcctggcggggagaagccccaaggcccacaagttggccatagacacaagtgcagcctcaatgtggtagcccactgaggggtccgtgtggtccttgcagggtgcttttgaatgctttgacttctttgcctccactgagaaagtgacagacttcacttccaaagccgtttctggcatctggtgacagaccagctggaggcgagtggcagctgcctccacgggcagggcactggctcttctgggccacaggccgcacccgacccacctcagctccacgccctgcctggctctgtggccacttgcatgtaggctttgcccccaccaaggtgtctccaaaaacccagcccctgcctggcttgccagatgtgaggcctgcctgtgactgtcccagcaggaggcagggcacttgaattcacacatggggccttgtggccagcactgtcctggggccccataggcacttgtgtttgctgcccttgaccgggcctcaggcctcccaggaccttctcgactccctgttggtttttttttttttttttttgagagacattcctgctctgtctccctggctggagtgcagtggcgccacctcggctcatgcaaccttcgcctcctgggttcaagcgattttcctgcctcagcctcccgcgtagctgggattacaggcgcccaccactatgcccatctaatttttgtatttttagtagagacgggttttcgccattttggccaggctggtctcaaactcctgacctcaggtgatcctcagcctcccgaggtgctgggattataggcgtgagccactgcttcttgcctcaacgccctgttctaacagcaaagtctggccttgtgtccaccttgacttcctggggcccctgggcaaggcccggcttcaggcagacagccacggccaggagagacagggcagcggcagaccacggattttgtgggatcagtgttttctacacgttacaggcaggcctctggctggaggatgcctggcagccccaggcagggtccgggtttcgtgggatcagtgttttccacacattagaggcaggcctccggctggaggacatctggcagccccgggcagggtccttgtcagcagggcccacgttctcagctcactgtggcctttgcacagacacctcactcactacgtggtttagcaaaagttcactgagcccctgctgtgcgccagatgctggtctaggtgctgagatggagcaggacccgaagcagacaggaaaaaacaatccctgcccagagcatgcactaggcagagccgggagcagacagatgcctgtgtgctctgtatcagctgctgttaggtgctctaggtagaatgcaggcagggcaggggccggggagggcaggggctggcattttagatgatgggaggccagcagaagcctcactgagaagctgagttttgagcaaagacctgaaggagtggagggagggagccacagggaccctgagagctgatgttccaggcagagggagccgccagcggagaggccctgggcgcaggggggcgggggtgggggagacacccgtgtgtctggaaatggaacgggggcagagggggcctgcaggacacgactcagaccacagagggtggggaccgggtgactcgggatgcactggatgctctgcctggtccccatctgcatttgcatttgccacccggctcctgggacccccttgccctctactttgggaccaggcctttctgactctccctgtcccccactccttgttgttcatgggagcagagagtgtggttttggggctaaggaacactggcgcccacatgggaggaagtgccaggccaggccctggccccagcgccctgtcatttgcagccctcggggctgattatggggtgggtcaatttctgcccttcctcccccaaacccctcagggcaggactattccaccagtgtgaggaacaggagaaaaacaaggggggcctctccagggtcccaccgagcccagggggcagcagcctggccatggcgatcactcctctggcccctgcagctgtgtccccagggaggggaggggctgcactgcccatgccattgtcactccatggcatctcttcattgcgtctctgtcttgtctctgtgtgtgtcgtgctgtcctgtccctgcgtgtcggatgcacgtcctgtgtgccccactccttgctgggcccccacccaccattgcctgggaccccagaccatcgtgcggggcagcaaaggtgccaaagatggggccctcacgctgctgctggacgagtttgagaacatgtcggtgacacgctccaactccctgcggagagacagcccgccgccgcccgcccgtgcccgccaggaaaatgggatgccagaggagccggccaccacggccagagggggcccagggaaggcaggcagccgaggccggttcgccggtcacagcgaggcgggtggcggcagtggtgacaggcgacgggcggggccagagaagaggcccaagtcttccagggagggctcagggggtccccaggagtcctcccgggacaaacgccccctctccgggcctgatgtcggcaccccccagcctgctggtctggccagtggggcgaaactggcagctggccggccctttaacacctacccgagggctgacacggaccacccatcccggggtgcccaggtaacccatcccccgccccagggcccccactgtcccctgcccgttgctcctctgtccccaccttccagccccgccccaccaccgtgcatctcatcctgaccacccatgtgtctgtcccatcgctgggtctctctcctgcttagggagcagagctgctccctggcacccatcactgacagctacctctcttctgtttcagggggagcctcatgacgtggcccctaacgggccatcagcggggggcctggccatcccccagtcctcctcctcctcctcccggcctcccacccgagcccgaggtgcccccagccctggagtgctgggaccccacgcctcagagccccagctggcccctccagcctgcacccccgccgcccctgctgttcctgggccccctggcccccgctcaccacagcgggagccacagcgagtatcccatgagcagttccgggctgccctgcagctggtggtggacccaggcgacccccgctcctacctggacaacttcatcaagattggcgagggctccacgggcatcgtgtgcatcgccaccgtgcgcagctcgggcaagctggtggccgtcaagaagatggacctgcgcaagcagcagaggcgcgagctgctcttcaacgaggtgcgggcgctgctgccctgccgccctgctggtcctcccacccctccctcccaccctccctcccctcctccctcctctccctgcactcctccgtgctgggccaggctcccctcctcccctcactcttctccctccccaggccgtctcgtccgccccagctgggtccctgcctctgtcctcacagcaccctcacccacatctctgtccctgagccccagacccagggttcctcgggccactgacccccgacccagtgtcttccaggcccctcgcacccactgaggcccgcctgggctccagggtacagtgtcctccagacctgcccctcctgggttccctgtgccccgccctggcctccactcctgggtgtccctcggcacagcccacacaaccaccaagagtatgtttctgacgttcaggcccaccccctccccgtccctccttagagaccctggcagtgccccgtagcaccctgacgataggaagcccaggtccctttgccgggtgtgtgaggcccctctcgaccccgttgcccatcacagtgccgggctgcaccatggagctcctcgcctgggttcctcatcctcccgccgacacacgcctcttctctcatccttgcccttgtccgggtctcagccctgtgattgaacgctctcttcccacctgccccccagcactagcccaggactgacctgagatgggcgtgtgcccaggggggcgcgcccccagaagggaggcgtgggcttcaagctggctctgaggcccacgtggctgtggcagtaggggagggcagtccaggtggccccagtgagcacaagcttaatgtggaactgcagggggagccaggggggtggcggtggctgggtctggcactggcagccctcccgcctccctccaccactgacccagcccctgcacaggtggtaatcatgagggactaccagcacgagaatgtggtggagatgtacaacagctacctggtgggggacgagctctgggtggtcatggagttcctggaaggaggcgccctcaccgacatcgtcacccacaccaggtatttctggggcctcagacccctcctgtgacacgaccaagtcccctccagaccactaggggtggggccacatctccaaaccagctgtgctccgggcccctgggatggggtcgtgtcttccattcctcccactccagagtggggtcgagtggtctcagattcctcccactgcaaggcagggctgcgtccccctcggcaccccggggtgctgtccagctggctgctcaccccccaccccaccccgcaggatgaacgaggagcagatcgcggccgtgtgccttgcagtgctgcaggccctgtcggtgctccacgcccagggcgtcatccaccgggacatcaagagcgactcgatcctgctgacccatgatggcagggtgaggggacgggcggcggggtacgggggcggcaggtttccggctgcggggcttccctgcctcttcccatcccctgtgagggtaggtgagctctgacccccaggtctgtgtcttgaggagctgggaacttcgtccctccctggtggagcagcccagagtcaggttccagctcagtggggactctgtgcagtgggagggcacaggctggcgggggctctgccatcagcacaggacactgggcccaggggcagggatctgggcagacagcgcagcccccgccacaggcttcttcctccactgaaaagctgctccctgcccagcacccagggcggtccatggaccccagtcctgtcttccatgctttggactgaggttccaaatctgaggctgtgacaattataacgtcgggtggacatgattttctgtgagagagggcccttgacttgaatgaaatgcttgcagaagtggatgactccatcccctcccccaaggaagattaagccacaccattagtccaggcagaggcagagagagctctgtgtcactgacagtctgaaaatctccagatgtctatagatgtgttttgggggcgatgtctatgggccacctgagattgtccacacacggttgtggggatgtttgctggaggcaggaagacccatagaaatcctcaaaaatcggaaagggacccacagttcctaagaaggtgtgagaggcctggttgtcgcaaaggcaggctgtgtcccctcacggccctagtgcagggctactttctgctccaaccgaactaaagacttgttccagggcagcagggccccagggcacaggcttttggggccacccctgttcccagctccggccctgcctttgctatctgcagtactcaggccagtgtccccaaaagccccagaggctgtcagggagggaaatggggggatcgtgggggaggtgacttgcccgagggcccccaccaggaggtggtggagctccccattggtctggctctagaccccagctctgaccctagaccccagctctgacctctgggccgcacattgtgtctgaagccaaggaatgacgcaggcagacgcccctgctcgccctcctgctgtgccagctcctctgaccccactgcctctgccctgtcccaggtgaagctgtcagactttgggttctgcgcccaggtgagcaaggaagtgccccgaaggaagtcgctggtcggcacgccctactggatggccccagagctcatctcccgccttccctacgggccagaggtgagccccggggtggcttggttgtcccgccgtggacagcgtacgctgccattttccagctgcagcgctggcgggagatggggcccagtctggggagtcattgccaggaatggtgctctggacaaggaggtactgcaggcatgcatgtattcattcttcttttttttttttgagatggagtctcgctctgttgcccaggctggagtgcagtggtgcaatctcagctcactgcaacctccacctcccgggttcaagcgattctcctgcctcagcctcccgagaagctggttttacaggcacccgccaccatgcctggctaatttttgtattagtagagatgggggtttcaccatgttggccaggttggtcttgaactcctgacctcaggtgatctatccgccttggcctcctaaagtgctgggattacagatgtgagccaccgcgcccagccttggctctgccttctgagcattgttttcacaggccggctttccccttgtgggagcagagctggtcccggcagctctgggaagtgtctcccacctatgggctcctctttttccctgggtgttttgggtaaagtccccaggttggctctgattggctcagcctgggtcctgtgcctgtttctgaaccaatcactgtgtctccactgtggtgatgaggccgcatgggtcctgaacccaccagtggatgctacctgggctgagggagggaggacacctgggggcagttgacagaaagaagaggggtgggtgctgggggggcagctctcttgaggggctccctggaggactagtgctctgtggactgctggctgggtgcccaagagggagttctgggccaaggactccaggagccagaggcagagacagcgctggagcggtccctgcctgaggcctccccaggacccaccatcccccaacagctcagccctgctgtcccttctcccgccccaggtagacatctggtcgctggggataatggtgattgagatggtggacggagagcccccctacttcaacgagccacccctcaaagccatgaagatgattcgggacaacctgccaccccgactgaagaacctgcacaaggtaggcccctccctggctgggaaactgtgcgccagctggcgggtggcagggctccaggtggagcatggggtgtggatgggatggggacaatgatggcgcctgggatggcgcttactgtgtgctgggccccccacccccgggcctcatgtgtctgtgcagaccccctctgtggggcctgggcgacagaggcagcagagccacaggccctctgcaccctcaccattgccctgggccccacccagccctagagagatttgcacgtttagaagtggaggacagggccgggaccttcctagtggaggacttgccaggagggaaaggggcacctctgggccccagttgctttcagcttcttgctaaaccatggaaatagggagtacatgagcccccagggtttgtcacttcctctggggccacatagtaagcgccatcacaggtgccatcactgtccctgtcccgtctacaccccaagatctagacacccatgacctccgccccctgccctcctgcacagtacatgccgccagccgacttggcagaggcggacactgcagccctacagcaaatgaacagtggggagcctcgccccctgaccctcccctccttctcgacaggtgtcgccatccctgaagggcttcctggaccgcctgctggtgcgagaccctgcccagcgggccacggcagccgagctgctgaagcacccattcctggccaaggcagggccgcctgccagcatcgtgcccctcatgcgccagaaccgcaccagatgaggcccagcgcccttcccctcaaccaaagagccccccgggtcacccccgccccactgaggccagtagggggccaggcctcccactcctcccagcccgggagatgctccgcgtggcaccaccctccttgctgggggtagatgagaccctactactgaactccagttttgatctcgtgacttttagaaaaacacagggactcgtgggagcaagcgaggctcccaggacccccaccctctgggacaggccctcccccatgttcttctgtctccaggaagggcagcggccctcccatcactggaagtctgcagtgggggtcgctgggggtggagagaacactaagaggtgaacatgtatgagtgtgtgcacgcgtgtgagtgtgcatgtgtgtgtgtgcaaaggtccagccaccccgtcctccagcctgcaaggggtgtctggcgccttgcctgacacccagccccctctccccctgagccattgtgggggtcgatcatgaatgtccgaagagtggccttttcccgtagccctgcgccccctttctgtggctggatggggagacaggtcagggccccccaccctctccagcccctgcagcaaatgactactgcacctggacagcctcctcttttctagaagtctatttatattgtcattttataacactctagcccctgcccttattgggggacagatggtccctgtcctgcggggtggccctggcagaaccactgcctgaagaaccaggttcctgcccggtcagcgcagccccagcccgcccacccctgcctcgagttagttttacaattaaaacattgtcttgttttgtgtctgtgtgcgatgtgtggggggcagggggccctgcccggctgtcttgggtgggaatttgcagggagagggtctggatctgggagcaaaccacgattccagccaaggcagggcaagggtggggtggggagtggggagttcaggtcatagcagccagtaagctcccccagcctgccactccccagaatggggcaggattgtccccacccctggaagcagccagtttgccacagtccatgtgcagactgatcccagtttgccaaatctgcaatttcctggaaccttttaaaggctgtcttgagcgcgtttggtgagtaggagctaacccaagttagtaaattgaaggccatttggcaaattggtcagtgggcagatgggcttttggggattgactgaggctgactggcctggagctgctggcttcggagagacaccctgtgaagtgtgtccttccacgcaggagcccagagccgagcccacgctggggggaatctgactggcatggaggtggccatgccaccatcgctgctgcagctgcatcctggcactttgcgcctcaggccctgttgggctccactttctgcatcctccccagcccccagggaggcagtggagtggggagagagccaggagtgagcctccgtccccaaagccagccaggcgtcatcagcaccagagacctcagcctggtcctctcgggaagtgagtggccagggcagagattccaggttagtccacgcctcccacccttcacaggtcctgaccccaagaatcagagcactgtgtgtgtggcagggcctatgccaagtgcaaacacagcctagatggatcatcacagagtgaaacccagcggtgcaagcagctgtgctctctgcgatgtattggaggcttaggtgaggtggatgcctttctggaaaaaaaaaaaatgctaacattggcaaaagaagaaatagaaaacaagaccaaaataactgtctcctcactgcacacacactccagaataaataaaaggtttcaggcttgaatgcactttcaaatgagattttttttttttttttgagacggagtatcgctctgtcgcccaggctggagtgcagtggcacgatcttggctcactgcaacttctgcctcctgggttcaagcgattctcctgcctcagcctcccaagtagctgggattacaggcgcttgccaccacgccaggctaattttttgtattttgagtagagactggatttcgccatcttggccagactggtcttgaactcctgacctcgtgatccacccacctcagcctcccaaagtgctgggattacaggcatgagccaccatgcctggcctcaaatgaggtttaccagactttgaaggagcaggtaattccttctaccttgtgaacaagttgttccagaaagatagcagctcaggaggcctctgtgaccatggttccagacccagataaggacggcaaagaacagagcatctcagaaacgcaaggctcacagccagggtgcccggcgaccccacgggcactgagaacagctagctctaggagctccactctcctgctgaagaaaccacgggctcagagacggggagctccctcgcccagccacatctgtgaccccacggtaactctgctggttttggtgccttcagtcactcactgcaggtttgttttgttttgttttgttttgagtttttttgttttttgttttttgtttttagagacaagatgttgctatgttgcctaggctggtttcgaactcctggcctcaagggatcctccctccttggccccgcaaagtgctgggattacaggcgtgagccaccgtgcccagcccgctcactgcagtttgaaggcatggctttgggtggcgtggggtgaaagctgcccgaggccccgttcctccccacgtggctgcctcctgccagagccagtcaggaaaacagaccccaactagagttgtttcaaatggcagggatttggtaccggtggttggatcatgacaaagctctgagaaggctggaggagccacagagtgccaagtgcccagcaatcattagaggaaggaggctgctgccacctgtgtggctagaggaacagaggggccaatggcattccccaaaccccactctcgcctctgtctggccagagcagaatggcttcttccagcttcccaccctggactcccacccaggagcctcctcctggcagacccttcctgaccccaccggcccggggggtctacagatccatgtttcaggcgtccgcctggagcggaacaggggagtgcttaggacaagggtggtgccagaggatccactctgcccacatttagttgaccagctgaggcactccacgggaatgaatgactctcgacaggtgccggaggtgaggaggggcccggaggcccaggaggggcacagggatggattcgtccgcctgggggctggaggtgtgtttacagagccccaaaataaacaatgcaaccaggtcagaccagcggttctcacagtgtggttcccagaccagcagcatcactgggagcttactggacacgcaaataaatccctgtgtgccaccccagctgcatcagatgctggtggggcccagtgatctgtatttaacacaccctccgggggatgccggtgcccactcacgtttgagaacccctgcgatccacgactgccctcccgtgtaaaaggcccacctctgtgggactccaagtcatcagcaccctagggtccttccgtctttttccttcctcctgggacacctgcctctcccatgtcgtattagagaattccttatgctcccaagtgggcacggggagaggaaggcactcctctttaaggaccgacccagaggttttgccattgcttcactggccagagcttagtcacgcagcctcacccagaggcaagggaggttggaaaatgtagtgtttgtgtgtgtctaacacaaattctattaccatgcagtcaggattctccactcttgctctttcattagatttgctgggcttcaccctggactttctgatttagtgacagaacagagaacccagaggcagacccagatgtgtacaagggcttcatatacaatcaggagatttaataatcatgctaggggccgggtgcagtggctcacgcctgtaatcccaagcactttggggagccgaggcaggcagatcacttgaggtcaggagtttgagaccagcctgggcaacaaagtgagaccctgtctctactaaaaataacaaaaattagccgggcgtggtggtgggcgcctgtaatcccagctcctcgggtggctgaggcatgagaatcacttgaacccaggaggcagaggtttcagtgagctgagatcacatcactgcactccagcctgggtgacagagtgagattctgtcaaaaaaaaaaaaagacaaaaaacaacaggtacggtggcttacacctgtaatcccagcagtttgtgaggccgaggtgggcagatcacctgaggtcaggagttcaggaccagcctggccaccatggtgaaaccctatctctagtaaaaatacaaaaaaattagccaggcatggtggcgggtgcctgtaatcccacctatttgggaggctgaggcaggcggattgcttgaatccgggagttggaggttgcagtgagctgagatcacgccactgcactccagcctgggcaacaagagcaaaactccatctcaaaaaaaaaataattttcatttgtaataggtatcagaatggggaaaaatatttgcagagtctagcactgataagatatcttcttaacaagaaaaagagaccagccataacaggacaatgggcaaaggatatgaacaggcaatttagagaagaaagaactcaaagcccagtaagggtgttcacagctgctcaaactcgttagtcatcagagacatgcacgttcaaaccgtgcggcggtattttacaccatgagtctgataaaaacagatccagcttagtcaagtgttgcacatatgtatctcccaatgattccaatagtcacacccgggtgacttcccaaagaaactctctggacctgaggaagagtcgatgaggacgttcactgtagcattatttgtggggtggagctggaggcaggggcatgtccaccccaggggagtgggtggctaaacagaaggggtgcacccccaaaattcctgtccagacagcaggtaagaaaaacaataataagattcataatacaaggctgggtgtataaatagcaaattatggacataaaacaatggtcctcattttgcaaggttaggagactcatttgcatattagcatggctgccactggggagggagaggggtgagggaaagaatgaatgaactgcagatcttgggagaaatgaaggccttgaaggccacactgaggcttggttctctaagcaaaggggaactcccttttgtgtggcttggggcctggtcacaggtatttaatataaaaataagccaggtgatcctaacatacagccaggattgagaatgggagaatgggctgggcaaggtggctcacacctgtaatcccagcactttgggaggcagaggtgggtggatcacctgagtttaggagttccagaccagcctggccgacatggtgaaaccccgtctctactaagaatacaaaaattagccacgcatggtggcgggcgcttgtaatcccagctactcgggaggctgaggcaggagaactgcttgaacctgggaggtggaggttgcagtgagccaagatcgtgccattgcacaccagcctgggcaacgagcgaaactccatctcaaaaacaaaaaacattgatcgaagtctggctgtgttcaggggctttgctaagctcctagttttgcgccatttaactcctgtagtggttaccaccccccaaggaaaaggttccccccaccaaaaaaaaaaatagattcccccccactcacaaaaaaagataggtccacggaaaatctgtgagtgtggccttatttgggaaaagggtctttgcagatgtgtcctgagttaaggatctggaaatgaggtcaccctggtgtatccgggtgggctcttatctactgaaaagtgtcctttagagaaatgcagaggagatttggggcacacagagaagcagccatgagtcaggaaaagccaggggccttccaggagaagccagaaggggccaggaagcaatctgtcctgaaggcttcagagggaggagagccctgtccacacctgcacttcagacttcggcttccagaactgagagaatacagccaggcatggaggctcacgcctgtaatcccaacactttgggaggccaaggcaggtgaatcacttgaggccaggagttcgaaaccagcctggccaacatggcgaaaacctgtctctactaaaaacacaaaaattagccgggtgtggtggtgggcacctgtaatcccagctactcaggaggcagaggcaggagaattgcttgaacctgggaggcagagattgcagtgagccgagatcgcaccactgcactccagcctgggcaacagagcgagactcgtcctcaaaacaacaacaacaacaacaaaccagaactgagagaatacatggctgctgtttcaagccaccacgctgggaatttgtgatcgcagcccaggaaacatgaccctcgtagccgccttctgcggaactactgtaccttccttggcctgtttcacagatgagagacaggaacaaagatgtcaacctgaggtcacagagccagaaagtgatagaggcaggattcgaatcctggcatcgggcctgggagttcctgcatatcctcaccatgcagcactgagaagtgggtcagggctcccttcactaccccacttgtgggaccacagttaccaacagagaagtgcctgtgtcttcccaggtggctggtcacggaaggagggcaggccccaagccgcagactccaaaagggaggctgtcgtcctagggtgatccatggagacttggggtggagaggtgttggctgggggatgagatggggcagcaagcagggtcctggactgcccttgggggacacgggggcagctcagagccacgcttggggactgctggattatacgaaggtgaactctctgttccctcctctccctgcatcttttttcttttctttttttttgagatggagtctcgctctgtcgcccaggctgaagtgcagtgtcgagaccttggctcactgcaacctctgcctcctgggttcaagcaattctcctgcctcagccacctgagtagctgggattacaggcacaggccaccacgcccggctaatttttgtatttttagtacagacgaggtttcaccatgttggccaggctggtttcgaactcctgacctcaagttatctgcgcgcctcagcctccaaagtggtggaattacaggcatgagccaccgcgcccagcctcctcctacgtctttgtctctgccttcctttgtctctctctttcattctcctgcttagtctttttcattatttgaacaggtggcccaagcccatggtacaaaatgtaaaagatcccaaagggaataaatgggaaaatcagcctccctcccaccttacctccttccccatgcccagcctctcagttctgctccccagaggcagccactgatacaagtttcttgtgcttccttccagatatgtctgcatgtaccaggaaatacttacatgcatatacagacatgtattttccttcatacagatagcataatgggccaggcacggtggctcatgcctataatcccagcactttgggaggctgaggcgggtggatcacctggagtcaggagttcgagaccagcctgaccaacatggtaaaaccccgtctctactaaaagtacaaaaattagccgggcatggtggcttgcgcctgtaatcccagctacttgggaggctgaggccggagaatcacttgaacccgggaggcagaagttgcagtgagccgagattgtgccattgcactccagcctgggcgacagagagtctgtctcaaaaaataaaaataaaaaaaatgttgaatgttggcataacgggcacatccctctgccccttactttttcctacttaacaatgtatcttggtggttgttccctgctggtacataaaaagcaattttgatcctgttagcggctgtgtaatattccattgaacagaggaaccatgaatgataggaacagccactgtcactggacatttagggggcttggagtcgtttggtgttttttattttattttgttttttattttattttgagacaaggtctcactcgctctgtcgcccagcctggagtgtagtggcacaatctcagctcactgcaacctccgcctcctgggctcaagtgattctcccacctcagcctctcaagtagctaggattacaggtatgtgccaccacgcctggctaatttttttattttattttattttattttttatttatttatttttttgagatggagtctcgctctgtcgcccaggctggagtgcagtggcgtgatctcggctcactgcaagctctgcctcccgggttcacgccattctcctgcctcagcctcccaagtagctggggctacaggtgcccgccaccacgcccagctaatttttttgtatttttaggagagactgggtttcaccgtgttagccaggatggtctcgatctcctgacctcgtgatccacccgcctcggcctcccgaagtcctgggattacaggcgtgagccaccgtgcccggccaatttttttcttttttgtagagatggggtttcaccatgttgcccaggctgttctggaactcttgagctcaagcgatcctcccgtcttggcctcccaaagtgttgggattacaggggccctctcttcctgttttctggctctttgtgtatcttgttgctgtctctgcctctccctgtccacactcttccctccttctatccaacctcagtcctgcctctctgtcgccccctgcagggtgaagtgggctcactgcccctccaacctcacaaacctctgtggtttgtatctggggcagacagcacccaccccagcccacctttctactacccctgccccctcccgacctggctgcactttcccaccctccacagccctgatagagagcccaggatctgctcccccagccccaggtgcccaccctccaggacccctgcccttccccctctaccagcaggcttgggccccaggacgtgctgactcctgggggtgacaggttttgcagcaggtgcagtgggagctaggcttgggcaagttggaagcggtgcctcggctgggtcagagcctcttcctcctgccgcccagccgggccttcctgccctccctgcccagcaagcagagcaacgtcaggtcagccctgggctggggacagacaataaacagacctgcccaaggccctgccctggtgaggatgacattcgggcagggtgagagactgtgatccagtgacagccacacgcacagaggtatttacaaagcatgctgaatgcaagaaaggacgaatggggtgtgatagagaatagcagggaaggggaatttatctggcctggggatggcccagctctctttctttgtaccagtagagaacaatcaccaaaccatcttgttaggcagaaaaaagcaagaagggtgtgtgccgtatgacaaggtgacttgttttgttttgttgagacagtctctgtcacccaggctggagtgcagcggcacgatcttggctcactgcagcctcgacttcccaggctcaagtgatcctcccacctcagcctccgaagtaggtggaaccagaggcacttcccaccatgcctgtttttttttgttgttgtttgtttgtttttggtagagacaggggtctcgctatgttgcccaggcttgtctcaaactcctgagctcaagccatcctcctacctcagcctcccaaagtgctataattacaggcactgcaccaggccagtttttttgttttgttttgttttgttgagacggagtcttgctctgtcacccaggctggagtgcagtggcactatctcagctcactgcaacctctgcctcccaggctcaagcgattctcctgcctcagcctcctgagtagctgggattacaggcatgcaccaccatgcctcgctagttgttgtatttttggtagaaacggggtttcgccatgttggccaggctggtcttgaactcctgacctcaagtgatccgcctgcctcagcctcccaaagtgcccggattacaggtgtgagccaccatgcccggccattggccggcttttattatttcatctagttccctggttgtcgacaaggtgatgcttcccagattttcatctcagccccgacccctctctcagactccagccggtacatccagttgcccctggcatcacccctgcggatacctcgtacttcacatatatgcatggagtacttgatttcccaagaaccccctcaaagagctgccccattctgtctgacctcatctccccttcattctcttcaccccacactggcctccgtgctcttccccaacccaccaaaccccgtcgcacctcaaggcctttgcactgactgtttcctctcccagaatgctcctctcctaggcctttgtgcagctaattccttccccttcttcaggtttctgctcaaatatcacctcctccgagaagccctccctgaccaccccaactaggcaaggcttccacctgctcttctctgccctgacagcgcattcttcaccttcaaggcacttagtgctgtttgtcaattaactagttacttgttgaattgtaactagttaattgacatcccttcccccacaaggctgcaagccccgtggggacaggaatggtgtctgttctttcaccacattacaccccagtgcacagggcttggccattgaaggcatctcataaacatctgttgaaagaacaggtggtagaaagcaatgagaggctccggaccttgtttgctttataaaaattatattttttatcagcctgggtaacatggggagacccccatctctacaaaacatttaaaaattaactgggcatggtggtgtgtgcctgtggtcccagctacttgggaggctgaggtgggagaatcacttgagcccaggaggttgaggttacagtgagctatggtggtgccactgcactacagcctggtgacagagagaaaccctgtctcaaaaaaaaaattacacttaggctggatgtagtggctcatacctgtaatcccagcactttgggaggccacagtgggtggatcacctgagatcaggagttggagaccagcctgggcaacatggtgaaacctcgtctctagtaaaaatacaaaaaaaaattatttgggcgtggtgtcacatgcctgtaatcccagttactggggaggctgaggcaggagaatggcttgaacttaagaggcagaggttgcagtgagccgagattgcaccactgcactccagtctgggcaacagagtgagactgtctcaaaaattacacttaaaagtgtaataggctgggcacagtggctcatgcctgtaatcccagcactttgggaggctgaggtgagcagatcacttgaggtcaggagtttgagaacaacctggccaacatggtgaaaccccatctctagtaaaaatacaaaaattagctgggtgtggtggcaggtgcctgtaatcccagctactcgggaggctgaggcaggagaatcgctccaacccgggaggtggaggttgcagtgagccaagatcgtgccactgcactccagtctgggtgacagggcgagactccatctcaggaaaaaaaaaaaaaaagtgtaatacttaaaagaagtaatacgcataagtgataccaaatccaaaagtttcaaaggacatagagtacaaagtcattgtccccaccttgcctgtctcggacgccaccagatctcgcccgcagagtcactttctggaagagatctgacaaatcttcattttatatacatatatatatatatatatatatatgtatgtatattttcttcttctttttcttcttcggcatccattttgaagcacaaggcccactgttccatatcttgctcttctacttaataactgcctcgtagatactttcttattagcaacatagagagaattggcatactgtttttgttttgtttcttattgaggtataatttacatacaataaactacgcccattttaaatctacagtttgctgaattttgacaaatgtatacacccatataatgacaactgcaattaaaatggaactttctcatcagcccacagcatttactcttgtgcctttttgtagttaagccccaccagcctcgtgaaattacagacctgctgtatctgattctagattagttttgctttttccagaactttagataactggaatcacatagtcggtactcttttatgtctggcttctttctttcctttttctttattgttcttttgtttatttatttactttgagtcggagtttcactctgtcgccaaggcgacactgagcagtggtgcaattttggctcactgcaacctctgcctcccgagttcaagcgactctcgtgcctcccgagtggctgggattacaggcgtgcatcaacgcttggctaatttttgtattattagtagagacagggcttcatcatgttggccagactggtcttgaactcctgagctcaggtgattcgcccgtctcggtgtcccaaagcgttgggattacaggcgtgatccgccgcgcccggctttcttttttctttatgctctaaaatctatcactggccaggcctagtggctcacacctataatcccagcactttggtaagtcgaggcaggactatctcttgagcccgggaatgtgagaccagcctgggcaacacagtgagactcccatcactacaaaaaatacaaaatttgtaaaataaataaattttaaaaatgtatcactgtattgcctggcttctttcattcatcacaatgtgtttgagagtcatctgtgttttgtatgtacccatagatcattcctgggctgggcgtggtggctcacacctgtaatctaacactttgggaggccgaggcgggaggattgcttgagctcaggagttcgagaccagcctgggcaacatgaggagactccctgtctctacaaaaaaatacaaaaattagttgggcttggtggtgtgtgtttgtggtcccagctacttgggaggctgaagcaggaggatcgtttgagcccaggagatggaggttgcattaagccgagatcgtgcccctggacttcagcctgggagacagagccagaccctgtctcaaaaaaaaaaaaaaaaaaaaaaaaaaaggtgattcctctccttgctgaagtgtgctccattgtggccattccagttagtttatgcacccactcgttgctgggcactcgggttcccctcagtttgcagctgttatgaaaaagtaccgtgaccaggtctctgtgtggacaatgttttcatttcccttggctaactacttcagagcagggtcactgtgtcgtaggttgtgcatattttttgttttataagaaattgtcggccaggtgcaggagctcatgcctgtaatcccaacactttgggaggccggggcgggtggatcacaagatcaggagttcaagaccagcctggccaatatggtgaaacctcatctctactaaaaatacaaaaaaattagctgggtgtggtggtgcatgcctgtaatctcagctactcaggaggctgaggcaggagaatcgcttgaacctgggagtcgggaagttacagtgagccaagatcacgccactgcactctagcctgggcgacagagcaagactctgtctaaaaaaaagaaaaaaaagaaaagaaattgtgcaatccttttccaacgtggtcataccactgctcgtgctttctgtacttcgtgatatatgagacgtggctttggggaagagggactgtgttggtcacccaggctttgacgtatttgggaaatagcctgtcggggctgaacccccatattagggactttaccatccccctgctggagagagggggacgtttgggacttattgttagaatgcacttggaggccgggtgcagtgtggttcacccctgtcatcccagcactttgggaggccgaggctgcagtgagctgtgatcagcatcactgcactccagcctgggcaacagggaaagatcctaactcaaataataataataataataataataataataataataatgcacttggctttgcagggcccagctgtggccctggatcccttggattgaagtaaaagggtttctcatagattctggggcccatcacaattactgaagccggctccttggaaataaatgcacatttctcagaggctccctgggtgaatctgacagaacctgccctaaagtttgggaaccgctgagtttgggaaccacaaaagccctgagatgcaagagaacaggtcctggaggcagagaccagaaacccaggaccttggatgctggccaaagagatgggatttttctcctgagggcactggggagtcatggagggcttaactgggggagtgacacagttcaggctttagtccaacccctgtggctgtcatgtgtatgggtgtgtgtggaacagatgtgagcgaggcacccagaaaggagatcatgtgaaaaccacagccagggtaggggtaggcaggaggggatgtcaatctctacagactctagttttctttattttcctttattatttttttttcaattctttttattttttattttttgagacagaatctctctctgttgcccaggctggagtgcagtggtgccatcttgactcactgcaacctccacctccccagttcaagtgattatcctcagtagctgggattacaggcatgtaccaccatgcctggttaatttttggtatttttagtagagattgtatttttagtttcaccatgttggccagactggtctcaaactcctgacctcaagtgatctgcccacctcagcctcccagagttctgggattacaggtgtgagccaccgagcccggcctattattattgttttttgagacagggtctcgctccatcacccaggctgcagtgcagtggcggcgccatctcagatcactgcaacctccacctcccaggctcaaacaatcctcctgcctcatcctcccaagtagctgggactacaggcatgtgccaccacgcctggctaacgaggtctcaccacgttgcccaggctggtatccaactcctaggctcaagtgatctgcccgcctcagcttcccaaagtgctgagattacaggcacaagccaccgcatccagccactctacagactcctggctgcccttctgtcctagtctcctccggctcccagccactccctgccctggattctgacctgggcacagctctgactacactcaccagacacccctccttctccttctcctcctcccccatggcgatgacaggtctcaggcagggagggtgggcagccaggacaagggcgtgggtttgtgtgcgtgtggtggtggtgggagtgtctggtcgtgcgtgtgttgtgagctctgccagtgtttgcctgggaatctgctggggacttccaggtgcagtatttgttgatctgctccctcccctggtttttccccacccgctgggcactggttaattcccaactttccagggcagtcacttcacctctcttgcctcagttccctgatctgtcaatagagatacaattaccagttcccaactctgcagggttgtgaggttcaaagagtccaagactcaataaatgtaaccatcatctcctgcttgcttctgtatgagcccatgtttcttcccaggggcgatttgttttttgttttgttttgtttttgagatggagtcttgctctgttgcccagcctggagtgcagtggcacgatctcagttcactgcaacctctgcctcctggattcaagcgattctccggcctcagcctcccgagtagctgggactacaggcacgcaccaccatgcccagctaattttttttttttttgtatttttttttttttttagtagagatgggggtttcaccatgttagccaggctggtcttgaactcctgacctcaagtgatccgcctgccttggcctcccaaagtgctaagattacaggtgtgagccactgcgcctggcctgtttttgttttttgtttctttgagacaggatctcattctgtcacccaggctaaaatgcagtgatgcgatctcaggtcactgcaactttgacctcctgggctcaagcgatcctcccacctcagcctcttgagtagctgggaccacaggtgtgttccaccaaactgagataatttattaatttttttgtagagatggggtcttgccatgttgcccaggctggtctcaaactcgtgggttcaagtgatcttcctgcctcagcctcccaaagtgttagattaccggtgtgagccaccacactcagcccttgggggcaatttgaatctgtgtccctgtgtatgttctctaagattctgtatgcgagtgtgtctaactcgttgtgtaccagctgtgcaaccttgggtgagttactagacctctctgtgcctagtttcttcatctgctaaatgcacatgacttcctagtcatgctacttcctagggtggatgtggagactgaattaattgcctaattaattacctaagtccattgcaactaatggacttagtgcaatgcctggcatgagggcagcctcaattacatgatcattatcactggggcgtgacttctgtcccccacccgctgagtgtctgtgagtgtctgagcgttggggcaggaagtgcctgtgaaagcatgtggagttatctgggactatatgggacccagcctgggaaggcagcttctgtttccatggcacccctcacagggttgttgtattggaaagacccgtcccagagggcatccgccagcacacagctgcacacacatgtttgctgttacttttcctttacctataaaatgccagtcatagtagcacccaccttgtctttgtaggagaatgaaatgaacttagaggcgctcagtagaaagcactcacgcctgtaatcccagcactttgggaggccaaggcaggtggatcacttgaggtcaggagtttgagaccagtctgatcaagagggtgaaacctcgtctcttctaaaactacaaaattagctgggtgtggtggcacatgcctgtaatcccagctactcgggaggctgaggcaggagaatcacttcaacccgggaggcggaggttgcagtgagctgagatcgtgcttctgcacttcagcctgggtgacagagtgagactccatcagagagagagagagagagagaagcaagcgctcagtgctgagcttacctgggccaggtagagggatgtggccacgggcaggaagtggctgtgggaatctggcgctacaggttcctctgccaccccacttcctccacacctgacctcctgtccccacctgtgccccgtcccttgctcccacctcctcgtgacctctgatgggggaggcttctgcagccccccaccccagtcccaggcaggggtgcaggcccccagaacacccagttgggatcactgcttccctctcactgccatctttgtgcctccctggggtcccccatctctgaggctcctcatctctggttttgggtgtctctctgctctcctcaccttggttttctggacagtatgtgtcagggccccaagggggtgtcccaggtgaggacagagaaggaagtggcagaggcaggaccttccctttgcacctcagctcatccatccactccccctctgcagagtggggagggggaggaggggggtcttcgttaattagcctcttaatcctgccatgctggatcttaatgaggtgcacgggtcccattagacagcccggagccctggcattagcacattagtcacacgctctgtcaggctcacgctgggtcctcagctggccctgggaaaattggggcaggaagtctggggacctaaggagggggctggtgcctggacttctgggtctgaagaaggaggggctggtgcctggactcctggatctgagggaggacggactgggggcctggattcctgggtctgcgggaagaggggctggtgcctggactcctgggtctgagggaggaggggctggggtcttgaattcctgggtctgagggaggaggggctaggggcctggactcctgggtctgagggaggaggggctggggtcttgaattcctgggtctgagggaggaggggctaggggcctggactcctgggtctgagggaggagggtccgagggacaagatcctcccccgacacgcccctctcttaaatgtcagccagggtgccctgccccttcccgctcccagttaaccccagccctgtgaaaccgggacagtcgcgcagcctcgagggatggaggaggtgcgtgagggacacgcgctcggtggcgggatggaagccgatgggcccgcgagcctccaggagctgcctccctcgccacggtcgccttcaccgccgccgtcgccgccaccactgccctcgccgccgtcgctgccatcgcccgcagccccggaggcccccgagctccccgagccggcgcagccgtccgaggctcacgcccggcagctgctgctggaggagtgggggccgctgagcgggggcctggagctgccccagcgcctcacctggaagctgctcctgttgcggcggccgctctaccgcaacctgctgcgctcgcccaaccccgaaggtgcgcaagggcccagagcagccaggaggcaccaccctgaccgtctgtctcttcctctttccctgtttccttatctctctacctctttgtctctctctgtctatgcatttctctgcatccctctgtctctttttctgtcattgtgcctctccattttaccacctgtctctctgtcatgtctcttacctacctctctcacacctctccctcacacctctccatctctctttctctctcctcctctctctctccccctctgcctatgtttctgtctcttgagacggagtcttgctgtcgcccaggctggaatgcagtggtgcaatctcagctcactgcaacctccgcctcccaggctcaggcaattctcctgcctcagtctcccgagtagctgggattacaggcatgcaccaccatgcctggctaatttttgtatttttagtagacacagggtttcgtcatgttggccaggctgggctggtttcaaactcttggcctgtctctttctctgggttcttctctctgtccctctgtctctgtctgtctcaccacaccccacttacccctggcattgccctctccccagcccagagccctgactcactcatccctgccgggcttccctgacctggcacagattcctgcccttccagtgtatagccctgcgggtagggaggggtgaggcggtggaagatggaggggctgcccagaggctccactcacctgtccatttcaggcatcaacatttatgagccagcaccccctactggtcccacccagcgacccctggaaactctgggtaagtgcttggagggccaggttgctgagggtggggagggtcctccagcgttggggtgtcctaaccctttgctccccaacctgcaggcaatttccgtggctggtacattagaactgaaaagctccagcagaaccaaaggtgagtcgccagggccagtgtggcttacactccattccctgctccacccttcctcactgtgagacctggagaaactgacttggcctctctggacctccatttcctgctctgtaaacagggttagcataagagagaatgcttgtaaaacacacagcatagggcccggccaggtctggctagcaccagtcaatagcagctattattggtttttggtttttgtttttaagatgaagtctcactctgttgcccagactggagtgcagtgacgcaatctcagctcactgcaacctctgcctcccaggttcatgcaattctcctgcctcagcctcctgagtagctaggattataggtgtgcgccatcatgcccagctcattttgtatttttagtagagacggagtttcaccatgttggccaggctggtctcgaactcctcacctcaagtgatctgcctgcctcagcctcccaaagtgctcagattacaggcatgagccaccgcgcctggctattcttgttattgttgtaattattctaaggctctttccctgggaggggaagagtcaccccaggcccctgtcctccatgaaacagagccttgctcctgcacagtagatgagctggtgtgacttggaggctcagggtcacacaggccagggttgggatcctggctctgccacatgtttgctgcttgaccttggacacgtctccatcctcagcctcaggttccttgtctgtagcatggggttcaggatgcattgccctcagaggggcccgtgggaactgagagtggaaggtgctgagggagcaccccacgtgtggggacccaagctatccctaagaaagcactaagacagggcttcctgctccctggatcctggcagatcgcagaccccgcctctcccggcccttctttcacagctggacagtgaagcagcagtgtgtggaccttctggccgagggcctgtgggaggagctgctggatgacgaacaaccagccattacggtcatggactggtgcgtgcccctcccctgccagcctgaccccgtgatcgcgcagggctgcccagagcatgagccttactctgagctccccttgctttcagcccttcaccaagaccctcctggtgctacagggtcctgccctgcccacctccctggccccttctgtttgagcctttcagattttgaaatgtgccagggggttactgaggctgatctttatttctttttcttttcttttttttttcttttttctttcttttttttttttttttttttttttgagacagctgactctgtcgcccatgctggactgcagtggtgccatctcagctcactgctacctctgcctcgcaggttcaagcgattctcctgcctcagcttcccaagtaactgggactacaggcgcgcgccaccatacctggctaatttctgtatttttagtagcgatggggtttcaccatgttgcccaggctggtctcgaactcctgacatcaagtgatctgcctgccttggcctcccaaagtgctgggattacaggtgtgagccactgtgcccagcctattccttatttcttaaaagcctgtcaccctctattctcaagaccaattccttcttattccttaggagtcacttccacatggctgcaccaggaagccctccctgatcacccctcagctgggtcacgtgcattttctccagtgccctgtgcctccaattccagccccaacccctctgcctgggtccccaattccgaccccaacccctctgcctgtgtccccagttctgtccccaactcctctgcctgggtccccccatcctggccctgacccctctgcccgtgctccccatcccaaacctggccgttcctggctgtcatgtttggtggcatgcctgcctccctcactggactgtgaatcccatgtggcagggtgtggggctgtcttggtcactgctatgttgccagcaccacccagctcagggctgtgtacagcatgggtagcagcatgtgtgttgaatggggaatggggccaggggctggggctgggtagctgagactgcagtgacagctgaaggccttgactccgcctgcaggttcgaggacagccggctggatgcgtgcgtctatgagctgcatgtctggctgctggcggccgaccgccgcacggtcattgctcagcaccacgtggccccccgaacttctgggagaggaccccctggccgctgggtccaggtgagactctccgcgccggggccctcaaccccagacgtgtgttcttgtcccaagacctcacagagggaggagaacaggtccgcgggtcctcaaaaagggctcctccctaaccccaggtgctgtcaccacaggtgtcccacgtattccgccattatggtcccggtgtgcgctttatccacttcctgcacaaggccaagaaccgcatggagcctggtgggctgcggcggacacgggtgaccgactcctccgtgtctgtgcagctccgggagtgactggctggctcctctgtcctgaccccacagcacctccctgacctttaggagccccaactcttagtcacctcctaggcctcttatttctccctggcccttggcttctcacttgatggacagcttcacacacccttaagcggtggactccagcattttcccagcactgtctgagccccatgagggcggagccactccttgtaaattcagtgcccgacagatgctctggcacagatgctttgtagatctctgttgagagaatgcatagacacctgtgcccaaggatgctgagggctggtctctgcttctttgaacttcactgaaactgaatgctcactgctgtgttgccagcaccacccagcccagggctgtgaacggagtgggtggcagcaaatgtgtgttgaaaggggaatgaagccattcacttcactcagttcctgtcccatttaaccgccccgatccttgatcttccattaccttcacatcccggggtccttctgaactgaccttgacctctgatctcttcacacatctccccttagcatctccacttacctacttttttttttttttttgagatggcatctcactctgtcacccaggctggagtgtagtgacacgatctcgactcactgcaatttccacctctcaggttcaagtggttctcctgcctcagcctctcaagtagctgggattacaggtgcacagcacctcccccgactaatttttatatttttagtagagacgggatttcgccatgttggccaggctggtctcaaactcctgacctcaagtgatctgcccaccttggcttcccaaagtgctgggattgcagacgtgagtcactgcgcccagccattccatgtctcttaagtctcagaatctcccctagctccctccaggtgtctgcagtggttgtcccctcaaagctgtcccacaccctcctccgaggaccctttgtgtatctcctccagctaccgcagagcccacaaacccaggcatctatcaaagtccctcattcatgagggtggtgaggacacagactgcgaccagaacagaaatatgaaaatgtgaatgacagcgtcccccgtgtgtggaatgtggggattaaaagcatttatcaacctctaagtcctgatctgatcacttgcagatcctagccctagtgcagggctgggtactagaaggccccctgctgtcccctgcaggaaccatggagggagtccggaggcccctggaggccagaaacggctcaaggaagagtgtttgtttgtttgttttgagacagagtgctccctctgttgcccaggctggagtgcagtggcacgatctcggctcactgcaacctccacctcccaggttcaagcgatttctggctaatgtttgtggggtttttttgtttgtttgtttgtttgttttgttttgagatgaagtctcgctctgtcacatgatctcggctcactgccagctccgcctccaggttcaagccattctcccgcctcagcctcccgagtagctgggactacaggcgcccaccaccacgcctggctaatttttttgtatttttagtagatacggggtttcactgtgttacccaggatggtctcaatctcctgacctcgtgatccgcctgcctcggcctcccaaagtgctgggattacaggcgtgagccaccgcaccccgccctaatgtttgtatttttagtagagacggggtttcaccatgtttgccaggctggccttgaactcctgacctcaggtgatccgcccacctcagcctcccaaagtgctaggattacaggcctgagccaccacaccagggctaaggaagggctattactgaaaaggatggggcatgtttcatatttaacaatcagcccaaggttcccctgcagttcactcacatgtccttctgtgggcgtgtgtcttcgtgcacacctaaaaccatgtccgagtcgatggcgtgtccttatccatggcattgtcctgggtatgggctgacccaggcccaaccaccctgctgtctcctccatcccacccggtccttgcatcccagggacaagcagatgacagacggggacaactgcacaaaggctgtattgcaggggaggtgggagggggcaggcagaacgctcctcctcctgggtcttggggccccggagcagagcccagggatgggctgagtgaggggcttggcactctgtggaagctgcagatgagagaccagcaatgcatcagctgcacctgaaatgtaatcaagaattccttccaggggctctcagagacccagagtctggtgagttctagaagcctgagactgggtgggggctggggagtctgggtctgaggctccaagttcaggaaccagggatcctagcctgggagtttggagctgggggctccttggagctcttgggggacaggagtggctggggagggtttgggagggtgtcaccgctggatctaggtcccaggtctgtgagtgcaaggtggcctcagggacctccagggttgggtcttgggggtgggctgtgggactgattttagggctgaggctggtctggagggtctaggggagtggagagcatgaaggctacactgggtgttcctataatcgagtctggagtcttgaggtctgggttagttttggagtctgggagctttgagatgtgatgatctggggagtgggggctggctttggttctggggactccagggtgagggggtctaggagctctcagtccccagaattagccagccctctctgggaagtacagctgtgggcgggtgggtaggcggaagattccagaaggtggagggttggctctgaatctcagagctggggcggaaatctccgtcccaggggcctgggctgcaggtggagtggggaccgggtgctgggggtgaggagaaggaggacctggtttgggtgaggactctgagatgggggcctccaggactggttctagggaggcctggtgctccctgttacagtcgggagctcaggggtgtggagcagcctcggggcttgggtggtgggtgtgggggcttatgcggagctggggcctgggcctggggtgggctcggagctttgggcggccgggcacctgcagtagagcgcggagatagcgttggaccagtctcctaagatgccccggcggtactcctccaggcgcgggtaggtgccggcagagaacttgtgcgtcttgcccgccttgccttgccgggaccacacggtgagctcgcagcgcggggccaccacaagtgaggaggcggtgttggcccagttggagggcaggtagggcaggtctgcgcccgactccagcgacagctcggcgcccccgcagcagttctcatagtaggggtcgctcttgtcatagagcttggcgcaagtgcgcgtcccgtccgagtgcttgaggtcggcggaggcggggcaggcgccctgggcgcaaggcacggaggcaagggccagggccagcagcagcgggcgcagcggggacatggtggcagtgccctgccgcagccccgcgcgcttttatgcgcccgacccgtgggaagggacaagctgcgagataaggactcatcgagggaaggggagggcgcccctccctcaggagccgggagacctgcctaacctaggtcggaagcccacaaccctgagtacaaggtggacgctgtgtatacaacttagcaccttaagatgttaggtgaccaacaacattataaagagagacaatagacagaacttgaggaggagtcatttgcaacacagagggtggcataggttaatagacagaaatgggaagagctcttaaaaattgacaaggggcttgctggttgctcacgcctgtaatcccagcactttgggaggcctagacgggtggatcgcttgggcccaggagtttgagaccagtctgggcaacatagcaagatcccatccctactgaaaaataaaattagctcagcgtggtggcatggcctgtagtcccatctactcacaaagcagaggcggaaggatcgcttgagcccgggagttcgaggctgcagtgagccgagatcgtttcactgcactccagcctgggcaacaaagacaggaaaaaaaagataaggaatggaacaacccttattctaaataaggaaagactgggagggggaggcaggagtgggaggctggggcctcctggctgggcaggctccctccctgggaggcaggaccttgggaaaggagaagctggagataaggatagaggccctcgtggtggggcgggggggggcaggtagagaaggagatggggaggagcccaacgccccaccccccacccccaccaggctcagactgggcaatcttcccaaccaaggctggcaatccagaatctgtgaagtacaagatagcagtatttgcataacacgttaaaaaccttttgcaagacagtgtacaaaggcttgaggagatatttgcaacatttcaaaagcatagcattgcaagctataatatataaagagtgcacacaggttgggcgcggtgactcacgcctgtaatcacaatactttgggagactgaggcaggtggatcatttgaggccaggagttcgagaccagcctggccaacatgatgaaaccccgtctctacttaaagtacaaaaattagccaggcgtggtggcacatgcctgtagtcccagctactcgggaggctgagggatgagaatcacttgaacccagaaggtggaagttgcagtgagccgagatcgcgtcaaaaaaaaagagtgcatacaaattgacaagaaatgcactcctccctcccacatgctaaggacaggcctaggagagggagagggagggaacagcctgcaactcccaccccaggagccaggagactttcttaactaaggttggaaatcttcaatctataaaacttcaatcttgttttatagattttgagctgtataaaactgtaaaaactgtcatatagcaaaaacaaaacaaaacccacaaacccatccagggaaaaatagactcaattcctatcatataaaatgagctcttaccaatcagccaatagaaatgaaacaagggccgggagcagtggctcacgcctgtagtcccagcactttggaaggcccaggtgagtggatcacttgaggtcaggagttcgagacccgcctggccaacatagtgaaaccctgtctctactaaaaatacaaaagttagctgggcacggtgacacacagagcctcgggaagctgaggcaggagaattgcttgaaccgaggaggcagaggttgcagtgagccgagatcacaccattgcactccagtctgggtgacagagtgattctgtcaaaaaaaaaaaaaaaaaaaaagagagaaagagaaaagaaacaagcaaaggaaaaattagagcagtataggaaggagagggagattggaaccctcgggctgaacagggacccggacctctgggagcctggccaaagcccttccaaggttctttggagttcccagcctcttcccaaaacagggtcaagtgtgtggatgcgctgattagagagacaagggtccactggctctgtcagtacaggtgtgggccttggtttcctcatctgtgaaatgggtaatgtttcctcctacgccatacgaatgttgaaaaggttgcaggagatggtagaagggatgtggtttaggaggacagtccatggagtcaaactgcctgggtccaaatcccagctcctctacaagctgtgcacatgaaggcctcagggacacgctgatggtacctacctcagagtgctggtataaggaataaattaattgggctgggcgcagaggctcaccgcctgtaatcccagcactttgggaggccaaggcaggaggatcacttgaggtcaggagttcaagatcagcctggccaacatggcaaagccccatctctactaaaaatacaaaacttatccggtcgtggtggcaggtgcctgtaatcccagctacttgggaggctgaagcagaagaattgcttaaacctgggaggccgaggctgcaatgaactgagatcgtgccattgcattccagcctgggtgatagagtgagaccctgccaaaaaaaaaaaaaaaaggaataaatgaattaatccacataacagcacttagagaagggatcggcctttgctaagtgccatatgagcatttgccatcatcatcaccaccatcttttttttttttttttaagagatagtctcactccgtctcccaggtctgcagcctcaacctcctgggcttaagcaatcctcccacctcagcttcccaagtagagaacatgccaccacaggcccgcaccaccacactctgctaattttttggttttttttgtagagatggggtttcaccatgttgcccaggctggtctcgaactcttgggctcaatcggtcctcctgcctcccacagtgctgggatcacaggtatgagccactgcacccggtgcatcattattattattaaaacctttagcacagtgcctggcacatagtaaggactcaataaacctcaaccatcacaacaacataacaccaacaatttgctgttatccacagtcactcagctaaacctatgccctgctggtcctccttagatgctgtggcttccacctcgggtggggtagggctgttgtagagagccaaagactggaaacacttggaagtgggttcggatgtttactctgccacctgcttgctgagcaaccttgggaaaatgaacttacctctctgagcttcagtttcctcctaccttcaatgggataatagaaaatgaggtctcatgagccaggcatgatggcacatgcccatagtcccagttacttaggaggccaaggcaggaggatcacttgagtccaggaggtcgaggctgcattgagctgtgattgcatcactgtgctccagcctgggcaatagacggaaaccctgtctcaaaaaaaaaaaaaaaaaaaaaaaagacgtctctataaagtaatttacaactgatataatacattatgaacaatccatataattgttatttataaatataatataggctgggcacggtggttcatgcctgtaatcctggcactctgggaggccgaggcgggaggatcacttgaggtcaggagttccgagaccagcctggccaacatggtgaaaccctgtctctactaaaaaaatacaaaaattagctgggcgcggtggcacatgcctgtaatcccagctactcaggaggctgaggaaggagaatcgcttgatcctgggaggcggaggttgtagtgagccaagatcgtgccattgcactccagcctgggtgacagagtgagactctgtctccagaaaaaaaaaaagaaagaaaaaaagaaatatatatacatacatatatatgtatatgtatgtaatatgaatacttaatatacaatattgcattaacacaatagtataaatgcaaatacataaagcatgaagtacagtgcccaacacatgataggtactcaatacatgggagctactatgactgttctcctaacagctctgagaccctggccattggcctggccctgcccagggatccttctttctcatttccttttgtgatcccttgaaatctaatctccagctgctgacttcccagagagcctccttggtcccaggggcacagaacacccaccctctggctctgcaccgccccagacacagggatggaggacagcagagtcacttagagtcctgcccaccccggagggccatgaacttcagacacagagagcgacatggctagggagaccctgacagggagacagacacaggcacaggaaggaacacggaaaccactgaggcacagtacacagcccgtgtctgacagagcccacagagacccagggcctgggcacagcattttcaatcccgcctcacacacgggcagggagtagggacacgcatcacacagccagccactgatggtcctggattctcactggtgaatcctaaggtagacacatgcacagatctggggcaacacgtacccctgtcccccaacggaaccacacacagccattgtcacaaacaagcctccagtcttcctccactcccgccctacactctacaaatctcacaatctcacacctgtgaaatcttttttttttttttgagacagagttccgctctcgttgcccaggctgctgcagtgcaatggtgcgatctcagctcactgcaacctctgcctcccgggttcaagcgattctcctgcctcagcctttcaagtagctgggattacaggtgcccgccaccatgcccagctaattttttgtatttttaatagagacagggttttgccatgttggccaggctggtctcaaactcctgacctcaggtgatccacccacctctgcctcccaaagtgctgggattacaggcgtgagccaccgcgcccggcctctttttttttttttttttttttttacattgtcggggtctcgatctgttggctagactggtctcaaaatcctggcctcaagcaatcctcccacctgagcctcccaaagtgctgggattataggcatgagccaccacacatcatgtgaaatctcacacacacacatctgacttgttcacataagcacacgtcacacacacacacacacacacacacacacacacaggcgcacagcgtcctcatccagaaacaatttcctcagtatttattaacacaaactagacaaatggtagaaaagcgaacatcttattacacaattttttctaataggagaatgtcctgcccttgaggaaccatgagcccttgagaatgtcagatggtaaataaatcaataattcgaacacaacgtgaaaagagttagaacaggggcatacaaaggaatgcaatgggaagaatgacaggttggtttgtttgtttcatatccactgatatattttggtttgtataataaggaatcctcttttcaggttttacaaccttgatttgacatttttcagcacagcataaaaagagagattgcttatacatgtgaaattgccactagaagaaaaacggaagtatttgtctccatcagggtggtacttgaacataaacaacattataggttgtacataatttaaatgaaaatgctgtgtgttgcataaatacaggaaaatactcagatcggtacttaagttcatactgggtcatcagaatgcattacaattttgtaaagatatgacactgaatgacattttctttctttttttgagacagggtcttgctctgttgtccaggctggagtacagtggtgcgatcacagctcactgcagcctcaaactcctggcctcaagcaatcttcctgcctcagcctcctgagtagctgggaccacaggtacacaccaccaagcccagctattttttttttttttttttgagtggagtctcgctctgttgcccaggctggagtgcagtggcacgatctcagctcactgcaagctccacctcccaggttcacgccattctcctgcctcagcctcccaagtagctgagactacaggcgcccgccaccacacccggctaattttttgtatttttagcagagatggggtttcaccgtgttagccaggatggtctcgatctcctgacctcatgatctgcctgcctcggcctcccaaagtgctggaattacaggcgtgagccaccgtgcccggccggcccagctaattaaaaaaaaattttttttttttttagagataaggtcttgctatgttgcccaggctggtctctagctcctgggcccaagcgatcctcctgctttggcctcccaatgtgttggggttacaggtatgaaccactgcacccagccagattatttccatataattctttttttttttttttttgagatggagtcttgcacttgtcacccaggctggagtgcagtggcgcgatctcggctcactgcaagctccgcctcctgggttcacgccattctcctgcctcagcctcccgagtagctgggactacaggtgcctgctaccacgcccagctaattattttgtatttttagtagagatggggttttaccctgttagccaggatggtctggatctcctgaccttgtgatctgcccgcttcggcctcccaaagtgctgggattacaggcgtgagtcaccacacctggctatttccatataattcttaagggatagtataatcccaaagcagccgtaactgtgtggtttggagacagtggttctcaaagggtactccctggaccaacagcatcagcatcctgtcagaacttgctagaagttaaaattctcacccccaccccagccctactctgggatggggccttgcaatctgggttttcacaagccctcctggttactccagtgcacactcaagtttaagaactgatggctagggcttcagtctgaggcttcctatgtcacgaatggtttattatacctagaattttcttctctttttctttttctttttttttttttttgagacggagttttgctttgttgcccaggctggagtgcagtgtcatgatcttggctcactgcaacctctgcctcctaggttcaagtgattctcctgccacagcctctcaaatggctgggattacagacacacgccaccatgcccggctaatttttgcatttttagtagagacggggtttcaccacgttggccaggctgctctcgaactcctgacctcaagcgatctgcctgcctcggcctcccaaagtgctgagattacaggcatgagccaccacgcccagcctacgtctagaattttctgtattgatacttcaatttgtttagatcctttaaaagtatatttcatgtaattctcctgattacagaaaaatattgtcattagcaattagaaaagggaacatctccagtgcctggagctccaaatgcccagactgaacttgaatctcctgcaacacagacaaaagattggtcatcagctaacctcaggacacagctcacctccattttctcagatacacctatggcaggtgaggtgccttgtcttaaaggttcccggggtcccacagtccctttctggtctaggccagagctactcaacttttaaggtgctgccaacctcctagagggagagggagagggagacgggaaaggtcttaagctacagattctgcttcaacaggtttgggcttgggtttaggtcctgaatttccttttttttttttttttttttgacagagtcttgctctgtcgcccaggctggggcacactgtagacaggatttcaccatgttggccaggctgatctcgaactcttgacctcaagcgatccacccgcctcggcctcccaaagcgctgggattacaggcgtgagtcactgcgcccggctgggtttaggtctgaatttcctgcaagttcccagagcatgccaggctgctgagggccattgcttgagtggcgaggctctctgcaaactgacagtctaagctgagacagataatgcaagaatacagcccaaatttggaacctgccaccaggaggaggtggcaggaatacagagggaagccaggcccagagaactcagggaagcgatggagatggaaactcagattaaattctgaaggaagccggtgaaggaagctggatctgaaactcttcagggctgcaatagcgttggtccaggagcccctgcgggtggggagtgaaaaccctaagccaagcccagattggggacagggtttcgctggtagcagggcccgggaagggggaacccagaagcgctcaggaggtggcgccatagcacagagattgagtgggtccaggactgtgggttcaaatcctgcctctgccttttatgggctgtgtgagtttgagcaacttactcagcctctctaagcttcagtttccctcatgcatgaagtggacacaatacacacacaaaaactgcttacgtgttcttagagttttgagatttgtagggaggtttcctgtttcttattgcttaatattggtcatcgatacattctgtctcgctctctcttattttttaaaatgttattaatttttatcaggcactctctgagccagagtagtctcagagactccctcattttttcttttcttttttttttttttttttttttttttttgagatagagtctcgctctgtcacccagattagagtgcaatggtgcaatcttggcttactgcgacctccgcctcccaggttcaagcaattctcctgcctcagcctcctgagtagctgggactataggtgcactccacgatgcccggcttattttttgtatttttagtagagacgaggtttcaccatgttggccaggctggtctcaaactcctgaccacaggtgatccaccggcctcagcctcacaaagtgctgggattacaggtgtgagccaccacgcctgacctcattttttctctatcagttttgatttataattgcaaaacttttttttttttagatggagttttgctcttgttgctcaggctggagtgcagtggtgcaatctcggctcactgcaacctctgcctcctgggtttaagtgattctcgtgcctcagccccctgagtagctggtattacaggcacccgccaccacacctggctaacttttgtatttttagtagaaacagggtttcaccatgttggccaggggctgatctcgagctcctgacctcaagtgatccacccgcctcagcctcccaaagtactgagattacaggcatgagccaccgcatctggccttataattgcaacatctttattagactcttcgccaatgataactaacagttggctttgtgggttcgggttctcctattgtacatttgtttctttaatttgatcttatttcattaatgataaatagcattagttaccattgtggatttggttattataccttttttttgtttgtttgttttgagttaaggtgttgctctgtcacccaggctggagtgcagtggtatgatcacagctaattgcagcctcaacctcctgggttcaagcaatcctcctgcctcagcctccagagtatctgagaatgtgccaccatacccagctatttttttttttttttagtacagctgggtctcactctgttgcccaggctgttcttgaactcttgggcccaagcaatcctcctgtctcagccttcccagtagctgggactatgggtgcatgccaccatgcccagctaatattttttctttttgtagagatgggatcactcactgtgttgccaagctgctttcaatctcctgggctcaagtgatcctcctgcctcggcctgctaaagcactgggatttcaggggtgaagcgctgctcccagcctattatatctttcatgcttgctttctttattcttttttcctttgagttttttgtttgtttgtttgtttgtttgtttttgaaacggggtctcgctctgtcatccaagctggagtgcagtggtgcgatctcagctcactgcaacctccgcctcccaagttcaagggattctcctgcctcagcctcccaagtagctgggactacaggcatgtgccaccatgcccagctaattttttgtagttttagtagagatggggtttcaccatgttgcccaggctggtcttgaactcctgacttcaagtgatccacccaccttggcctcccaaagtgctgggattacaggcatgagccaccatgcctggcccttttctttgagttttgcgtgctgttcttttcctcacatttaagatagatggttagctggcttattttcagcctcgttccttttcccacatttgtatttaaggctttacactttttttgtgggattgttgtgtgtcttacataagcaaaaagtatagtgggttgaggttatttcaggcacatggaaagtgctcagtgtgtttactgacatggatgatggttttgattattatttaatttatttatttattttgagacagagtcacactctgttgcccaggctggagtgcggtggcgcgatctcacctcactgcaacctccacctcccgggttcaagcaattctcctgcctcagcctcctgagtagctgaaattataggtgtgcactaccacacctggctaatttttgtattttttaaaatagagatggggtttccctatattggccaaggtggtcccgagctcctgatgttaggtgatccacctgcctcaacttcccaaagtgtgattattattattcttattaatcaggagctttagagtcagagaaagattcaagcaagaagtttggattaattatgaatcagtttcctattgctgccgtaacaaatgattgcaaacagtgctttacaacaacacagattcattatctcacagtcctggaggttggaagtccaaaatgagtctcctttggctaaaatcaaggtgtcatcgggctgccttccttctggaggctccaggggagaatcctgtttcttgcattttccagattctagaggccacttgcattccttagcttgtggccccttccttgttgaagtcagcaacagagaatctttaaatccctctatgactctgtccttttctgctgcctgctcttccactttaagggatccttacaattactctggtcctacccacataatccaggataatttcctttgttgttgttgttttttgttttaaagacacggagtcttactctgttgcccaggctggagggcagtggtgtgatcaccactcactgcagtcttgattacccaggctcaagcaatcctcctgcctcagctgcctgagtagccgggactacaggtatgcaccaccacacctggctaatttttgcatatttttgtagaaacagaatcttgctatgttgcccaggctggtctcaaactcctgggctcaagtgatcctccagcctcagcctcccaaagtgctgggactacaggcatgaaccaccgcacccagcctagagtccatgtttttagccactcagctccaggatacactgagcctggttgcatagtcaatttcttttcttttctttttttttgagatggagtgttgctctgtcgcccaggctggagtgcagtggcatgatctcagctcactgcaacctcagccttccaggttcaagaaattctcctgcctcagccagcctcccaagtagctgggattacaggcacgtgccaccatgcccaatttccttattttaaaatcaatgggacatgcgtggtggcttatgcctgtaatcccagcactttgggaagccgaggcgggcagatcacttgaggtcaggagtttgagaccagcctggccaatatggtgaaaccccatctctactaagaatacaaaaaattagctggacgtggtggcatgcacctgtagtcccagctactcaggaggctgaggcatgagaatcgcttgagcccgggagacagaggctgtagtgagccaaggtcacaccgctgcactccaacctgggtgacagagtgagactgtctcaaaaaaataaaataaaataatgattagtgactttaattccatctgcaaccttaactcttccttgctgtgtaacataatatattcgctagttctgaggacacctcggggggctgttattctgcccaaaaattagtattttgttttacaaatgaggagtattcttgtctttcatatgaagggagacagctaccaaggctgtctggggctccagtgtcagggcccaggctccttctgtcttgttgctccagcatcaaatgtggctttttcttgtggcccaatatggctgcttgagctccatccttcccatctacatcccagtcaacatgtggaggaagggagggagggaagaagaaggaaatgctcttccaggagcatggtacatgacactcctgtctacatcttgctgccagaacttagctagagatgggcactcaatgcctcaaaaagatggatctaggccaggcgcagtggctcacacctgtaatcccagcactttgggaggccgaggcaggcggattacgaggttaggagttcaagaccagcctggccaaagtggtgaaaccccatctctactaaaaatacaaaaaattagctgggcatggtggcaggtgcctgtaatcccagctactcaggaggctgaggcagaagaattgtttgaacccaggaggcagaggttgcagtgagctgagatcgcaccactgcactctagcccgggcgacagtgcgagactccatctcaaaaaaaaaaaaaaaaaaaaaaaagatctggccttgggttagctgtatgcctggtcacaaatcaaatttcctattactgaaggaagaacagatattgaggccatgtcacagattgaaggaataagaagcacattgaagggatgacagagtcagagaggacatagatgtccaggaaaaagtggaatccagcctttctacaatctgggtacagtagaaagaaggggggtgtggtcactgataatggctttcaagatatcccggaacctgtgggtgaccttatttggcaaaagaaacttcacagacgtgattgagttcaggatcgttcaatcagaggttgtcctggaagatctgggtggaccctaaatggaatcactaggctccctagaagagggaggcagaggaagatttggctacagaggaggaggcaaggtgaggatggaagcagaggttggagagatgttatttgaagatggaggaggccacgagccaaggaacgcaggccaacactggaagctgaaaaggtcggctgagcagggtggttcacacctgtaatcccagcactttgggaagtcaaggcaggcagatcacttgaggccaggagttcaagaccagcctgtccaacatggcgaaaccccatttctactaaaaaatacaaaaattagccaggcatggtggtgcatgcctgtaatcccctctactctggaggctgaggcaggagaattgctcgaacccaggaggcagaggttgcagtgagctgagatcgtgccactgcactccagcctgggcaacagaacaagactccagcacaaaaaggaaaaaaaaaaaaaaaaaaagaagctgaaaaggtcaagagcatggattctccactggggcttccgtaaggaaccaatcctgctgacatcttaattttaatcttgtaagacccaagtcagacgtctgacctccacagctgaaagaacacatctgtggtgttgtaagccactaagtgcattgccattggttacagcaggcacaggaaatgaaaacagtaactctgccctaaaatctcccttattccctaagagatataactgggggaggagatcccctgcgaaggtgggtgttggctgaagtccttcagggaaccaaaatgattctggggggctgggagaggggacttccagtaggcaaggggcagattcgagtgactggtgtcactttgctcaaaagtagtagtaggctgggtgtggtggttcacacctataatcccagtactttcggaggccaagccaggaggattgcttgagcccgggagtttgagaccagcctgggcaacatagtaagaccctgttgctactaaaaatttaaaaattagcccggtgtggttgctgtagagagggaacagcccctgctactggggaggctgaggtgggagcatcacttgagcccaggcgatccaggctgcagtgagctataattgcaccattgcattccagcctgggcaacacagcaagaccctgtctcaaaaaaaaaaaaaaaaagaagtagtagtaataaaaagaatgataaaaatggcagtaataaaaagaataccaataacaactaccggcatgtgcatctttattgcatgccggactctccgctaatagccttacacacgtgttcttttatcttcatagctaccctatgggacaatgagtccatcaaaatgggctgcattttcctgcagtaacaaatgacctcaagtctcagcggcttacgcctgcgaaggctgattgcctgcttacaccgtgtgctcatcccaggacactttggtgctgtgcttgtcattgtcctcacccaggctgagagagcagctaatccctggctcattgccagtctctgatcccagggaaaagcaggtgggataggcaccggcacttagtgcttaaagcttcattcccagatgacacaggtcacaccactctctccctttttttttttttcctttctgagacagagtcttgctccgtcacccaggctggagtgcagtggcgtgatcttggctcactgcaacctccacttcccgggtccaaccgattctcctgcctcagcctcccaagtagctgggattacaggcacacgccaccatgccctgcttatttttgtattttttaatagagacggggtttcaccatgttggcaaggctggtctcgaactcctgaccttgtgatccgcctgcctcagcctcccaaagtgctaggattacaggcgtgagccaccacgcccagccacattttaaaattttacaagtgacttcataaagtagatgaaaacgttgcccttgtggagattacactccagtagagggagacaggcaataaacaatttaaaataaatgtagttgccaggcacggtggctcacacctgtaatcctcgaaacttgggaggctgaggcgggcagattgcatgaggccaggagttcgagaccagcctggtcaacatggtgaaacctcatctctactaaaagtaccagaaatattagctgggtgtggtggtgtgtgcctgtagtcccagctactcaggacactgaggcatgagagttgcttgaacccaggaggtggaggctgcagtgagctgagaatgtgccactgcactgtagcctgtgcaacagaatgagaccctgtctcataataataataataataataataataataattgcagtgattgaatgccatgcccagtaggtgctatggagacaagtacagccgggagggaggatggagtgaggcgggtgcccttttgaatagcgtgatcaggggaccctcatgcagaagcatttggtcgaagactcgaggaggagaaggagggagacatggtgatactgggggaagagcattcgaggtagagggaacagccagtgcaaaggaatatttgaggaatagcaaggagtggacagaggtagacggagaaagggaggagatgaggtcagagtggtcacaggggcaggtcatgggggcctcacgtaaggtctttgtcactaaatatataaagtgaatgattcgggtcactccctttaccctgagtgacatggagccatgggcagattctgagcaggggagggacatgacctgcctcaggtgttcacttctggacatcaatgtcatgggcttaaaacagtcacatggccagatccaacatcaaagggcacagaagtacactctgcctttggcaagtccgtggcgagggtatagatggagggaggggtgaagaatttgcatcagtaactggatcttccccaggagtcatcactgtagcagtggggttgggttttaaaccatgagaatagacaactgcatcacagatagatgcgggagaaggctggggctgagccctggggtagtccagtgtttttgattttttgtttttgtttctgttttttttttaattttattttatatatatatttttgagacagggtcttgctctgtcgccaggctggagtgcagtggtgtgaccttggctcactgcaacttccaccttctgggttcaagtgattctcctgcctcagcctcccaagtagctgggattacaggcgggcaccaggacgcccagctaatttttgtatttttagtagagatgggggtttcaccatgttagccaggatggtctcgatctcttgacctcgtgatccgcccgccttggcctcccaaagtgctgggattacaggcgtgagccactgcacccagcctgtttctgtttttgagatggagtcccagtctgtcacccaagctggagttcagtagcacgatcttggctcactgcaacctccacctcccaggttcaagcaattctccctgtctcagcctcctgagaggctgggattacaggcacctgccaccatgtccgactcatttttgaattttttagtagagactgggttttgccaggttggccaggctggtcttgaactcctggcctcaggtgatccacccgcctcggcctcctaaagtgctgggattacaggcttgagtcaccaggcctggcctttgtttttgtttgttaacataggatcttgttctgtcatccaggctggagtgcagtggtgccatatcatagttcactgaagcctccgcctcctgggctcaagagatcctcccacttcagcctcccaaagtgctgggattacaggcgtgagccaccatggctggcagatgccagtgtttagaaatgaggagggagaggaagaataagcaaaagagaccgaggaggagcagacagtgtcaggaggggacctagaccatggaaggacgtgaagaatgtgtctcagcagcagagggtcatcacccatgtcaccactgctgacacatcaggaaagatggaactgagaagttagttactcctggattcagcaacatggaggtcattggttgtcttgacaagagctgaatctgcagtggttggggcaaaagcctcattggaatgtgtggaaaagagacacaggggaagaggaagtagagacaagaggaagtaggaagagaagaagaggatggagacaatgcttgacaattgttgctgaaaagacaagcagaggaatggagtagaagctggaggggtaggggtggagatagaatttcttttctttctttcttttctttcttttctttctttctttctttctttctctttctctttctctcccttcctgccttccttctttgttccctctcttcctccttcctttctctcttttacttccttccttacttacttttcttctccttctccttcttctaatttctttctttctttcctttcttctttctccttccttccttcttccttccctccttccttcctcccttcccttccccttccttccttccttcctttccttccttcctcccttcctccctccctcctttctttccttccttccttccttccttctttctttctttctttctttctttctttctttctttctttctttctttctgtctctctctctctctctctctttctttctttctttcatcttgctctgtcacctaggctggaatgcacgatcatagctcactgcagcctccaaactcctgggcttcagtgatcttcccaccgcagcctcccaaaagtgctgggattacaagcatgagccactgttcctgtccagaatttcattaaataaggtgcaactgatgatgcaagaatgtggggagaactgtggagcatgttcttgagagagagggtgggacacagaggccaagtggagaagttgggcttggaaaggaggttggggatcatatcatattggaacaggaggatagcagagtatctaggcctagacgctgggaagtaagtagagctgctggtgggagcacaggggatttctcttctatggcttctgtgttttcagtggaagaaacaaagccatccgtgagcgtggacatgtgggaggaagagttggaggtttaagaagagaggacacagctgagagcggttgcccacgcctgtaatcccagcactttgggacaccaagttgggcagatcacttaaggtcaggagttcgagaccagcctgaccaacatggtaaaaccccgtctctactaaaaatacaaacattagccgagtgtggtggcacacacctgtaatcccagctcctcaggaggctgaggccagaggatcgcttgagcccaggaggcagaggttgcagtgagccaagattgcaccactgcactgcagactgggggacatagtgaaattccatctcaaaaaaaaaaagcaaatctggctagatgggcaaggcaggaagattgcttgagctcaggagtttgagaccagcctgggcaacatggcgagaccccgtctctactaaaaatagaaaaaaatagtcaggtttggtggcgtgcacctgtgttcccagctacttgggaggctgaggtgagagaattgcatgagctcaggaggtggaggctgtactgagccaagatcgtgcctctgcactccagcctgggtgacagagtgagaccctgtctcaaaaaataaaatgaaataaaataaaataaaataaataataaaataaaaaaataaaaataagcacatttatgataagttagaaggtgatatatgctataaaaaaagtaatacagtacaagatatcaggagcacttgtgtgtaattccaaaagtgctggaattacaggcatgagccaccgcgcccggcccaaaaaaactttaaaaacgggggacactgggtgcggtggctcacgcctgtaatcccagcactttgggaggccgaggcaggaggatcacttgaggtcaggagttcgagaccagcctaaccaccgtgctgaaaccccgtctctactaaaaatacaaaaattagccaggcgtagtggtgcacgcctgtaatttcagctacctagaggctgaggcaagagaatcgcttgaacccaggaggtggttgcagtgagccgagatcgcaccactgcactccagtctaggcaacagagtgagactctgtctcataaataaataaataaataattttaaaaaagaaactctagccaggcatggtggttcatgcctgtaatcccagcattttgggagaccaaggtgagggaatcacttgagtccaggagttcaagaccagcctgagcaatgtagtaagaatccatctctacaaaaaaaaaaaaaaaaattagccacacatggttccagttactcaggaggctgagtggggggcatcacttgcccctgggagattgaggctgtggtgagctgtcatcacccactgcactccagcctgggtgacagagccagaccccatctcaaataagtaaataaacaaaaaacaaaacaaaacaaaacaaacaaaaacagcttgtagagatgaaacaaagcaccctgctctagcagacagtggagttcagaaccacggagagcagcccagtggtgctgccttcccggcaactgtactagctcctctcatgggggtttccattggccaatcccttccttagatcattgttctgaagatgacaaggaaacctttaggatcaaagtctttgctgctattggcttgtcaggtggcccaatttgaatctgaactggagttcgtttgtatacacaatcataaaactaatttgtcctttttgacatcagaattggagatacatgaatgtaggatgtattagactgccttgtcattcaaagcaaggaattaattcttcccttacaaagcaaggaattaatttcttggggaaaattataaatctctgacttatttacctcaggcttggctatgtcacgtgtttttgccagtgaaatgggagaggaagtaaagtggtttgtatcatttcttttctttttttgagatggggtctcactctgtcactcaggctggagtgcagtggcacaagcatggctcactgcagtctcaaactcctaggctcaagcaatcctcctgcctcagccatccccctccccacccaagtagctgggactgcaggtgtgagccaccaaacccggctaattttttgtatttttttgtagagatggggtctcactatgttgcccaggctggtctcaatctcctgagctccaggaaccctcccacgttggcctcccaaagtgctgggatttcaggaatgagccactgtgctcgaccaagtgtgtatcatttctgaacagaaactccgagagccagtgcatcgtccactacgggctctactgtaagaccagcaataagatgcttaagatgattttggctgcaagtaacagggcaagaccctgttttttaaaaaaggaaagaaacaaagaaaaggaaggaagttttgaaaatagaggaaaagggaggggcaatttatggaggaatgagacaggaggggccagggccaggcaccggcccaagttaggaagaaagggcactcatccctcatgacagggagcagggcaagtgtggggccaggtaggagatgaggaaggtccacccagcagcttctgtgaagtagatggcaaagtaatgcatttggagaggggcagggtgacaggtagtggatatgaggaagcagagaagggttgaaaaagccagagtgaaactttgaagagacaagtgtttgaagaagtggtgttgccacaagagggggcagttgaaagagcctggtgcccccagatgattcatcccttctccgaccccatggacaccaaacacaagaacgttgacagcttcataccgtggcagctttggggaatggtgatggcagagcaggcccattgagccagagttcttcaactttgagggaaactcatctttccttttcatgggtttcatcaaggatgattttggctgcaagtaatagaaaaccctaactcatttgagaggctgacgtaggcagatcacgaggtcaggagttcgagaccatcctggctaacatggtgaaaccccgtctctacgaaaaatacaaaaaaattagccggatgtagtggcaggcgcctgtagtcccagctactcaggaggctgaggcagaagaatggcatgaatcaagaggtggagcttgcaatgagctgagatctcaccactgtactccagcttgggtgacagaacgagagactctgtctcaaaaaaaaaaaaaaaaccctaactcaactggcttttaaatttgtatatatatcccaagtagctggcattacaccacgacacccagctaatttttttatttttagtagagttggggtttctccatgttggccggctggtctcgaactcctgacctcaggcgatttgcccaccttgatctcccaaagtgttgagattacaggcatgagccaccgcgcccgactaacgcagaaactcttaacaaaatatttgcgcatagaattcatcaatagatcaaaagaattatacaccatgacccaatggggttcatttcagagatgcaagcccggttcaatatttaaaaataatcagtataatccaccaaaacaggtggaagaagaaaaatcacatgatcatatcaaataatgcagaaaaagcatttgccatacttcagcacccgttcatgattaaaaagaaaaactctcagaaaaagtggaatggaggggaactgcctcaacttgataaagaacatctataaaaagcctacagctgtggggccaggcacggtggctcatgcctgtaatcccagcactttgggaggctgagacaggcaggttgtttgagctcatgagttcaacaccagcctgggcaacatggtgaaaccccatctccacaaaaaatgcaaaacttaatgatggaagactgagtgctttctccctaagatgaggaagaaggcaaagatgtcctctatcaccattcttattcaaccacagtactgaaagttccatctggtgcaatcaggcaagagaaggaaataaaaggcaactagatcaaaaaagaagaaataaaactgttagcaggctgggtgcaggggctcacacctgtaatcccagcactttgggaggtcgaggcaggtggatcacaaggtcaggaattcgagaccagcctgaccaacatggtgaaaccccatctctactaaaaatacaaaaattatccaggcttggtggtgcatgcctgtattctcagctactcaggaggctgaggcaggagaatcttttgaacctgggaggcggaagttgcagtgagccgagatcacgccactgcactccagcctgggcaacaagagtgaaactctgtctcaaacacacacacacacacacacacacacacacaatctgtttgcagatgacataattgtcaacatagaaaatccaagtaatctacaaaaattctcatagcactgagtccagcaagatgagagtatataagacaaacatacaaagatcaactgtctacattagcaacaaatgcactcattctatcaagaaatacttacacctaaagtgtgccaggcactgttttgtgtgctggggacataaaagtgaacaaaacagacagaaatctcttttgattgttggttgtgtgggggttttttgtttgtttttgttttttggtgtttttttgtttgtttgtttttgtttgcttgtttgtttgtttttgagactgagtctttctctattgcccaggctggagtgcagtagcacaacctctgctcactgcaatctccgtctcctggtttcaagcaattctcatgcctcggcctcccaagtagctggaactacaggcacctgccaccacgcccagctaatttttttgtatctttaatagagacaaggtttcaccatgttggccaggctggtctcaaactcctgacttcaagtgatcctcctgcctcagcctcccaaagtactgggattacaggcatgagccactgcgcctggcccagaaatctcttttgaacaccaaaacaaaaaatacagctagcctcagtggttcatgcctgtaatcctagcactttgggagaccaaggcaggctgatggtttgagggcaggagtttgagaccagcctgggcaacatggcaaaaccccatttctattaaaaaaaaaaaaaaaaaaaaaaaaccttggcatggttgcacgtgtctgtagtttcagcaacttgggaggctgaggtgagaggatcacctgagcccaggaggtggaggctgaactgagctgtgattccgccactgcgctccagcctgggcaatagagcaagaccctgtcctcaccaaccccccaaaataccatttataataacttttaaaaaaagaatcgcttaggtgaaatctaaggactcatatagtgaaagctataaaaccctgatggaaaacattaaaggagacctaattaaaaggagagacacactgcatttgtggattggaagactggacggagtaaagacctcagttctctccatattgatatgtagacttaatgcaattcctattcaaaactccagcaagacttttcagatatagacaagattattctacaatttacatgaacgctaaaggaactagaataagtaaaccaattttaaaaagaataggccgggcgtggtagctcacacctgtaatctcagtactgtgggaggctgaggcaggtggatcatctgaggtcgggagtttgagaccagcctggccaacatagtgaaaccccacctctactaaaaatacaaaaattagccaggcatggtggtgggtgcctgtagtcccagctactcaggaggctgaggcaggagaatcactcgaactcaggaggcagaggttgcagtgagccgagatcgcaccattgcactccagcctgggtgacagagtgagattccgtctcaaaaaaaaaatttaaatcagcaagagaatcgcttgaacccaggtggcagagtttgtagtaagccaagatcgtgccactgcactccagcgtggacaacagaacgagactccatctcaaaataaataaataaaattaaattaaacatttttaaaaattaaaagaagaataaaataagaggaactagcctgctgatttcaagacttaggatacactacagtaactgacagtgttgttttggtagagggagagacacatagaccaacgcaacacaatagaaaacccagaaatagacccacacaaatacgcccaactgatttttggcagaggtgcaaagccaactcaattgaggaagaatagccttttcaacaaatggtgtttggaccaattggatatctataggcagaaaagtggatcacaatataaacctcagatcttacgctcaaaatggatcaaaaatttaaatttaaagtgtaaaactaggccgggcacagtggctcacactgtaattccaacactttgggaggccaaggtgggcggataacctgagcccagaagttcgagaccagactggccaacacggtgaaatacaaaaattagccaggcgcagtgacatttacctgttatctcagctactcgggaggctgaggcagaaggatcacttgagcccaggaggcggaggttgcagcaagccaagatcacaccactgcactccagcctgggcaacgggagtgaaaccctgtctcaaaaaaaaaaaaaaaaaaaaaaaagtgaagctagaatatatttttaaaagaacataggggaaaatctttgggatctgaggcttcggaaagagtttttacacttgacactcaaagcacgattcataaaatgaaaagctgagaagttggacttcatcaaaatttaaatttttaatctgtggaagaccccattaagaagatataaagagttggccggtgtggtgacccacacctttaatcccagcactttgggaggccgaggcggatgatcacttgaggtcaggagttcgaaaccagcctggacaacctggcaagaccccatttttacaaaaagtacaaaaattagccaggcatggtgttgcatgcctgtggtcccaactactcgggaggctgaggtagaagatcatttgagcccaggaggtcgaggctacaatgagccaagattgtgccactgcactccagcctgggcaacaaagcaagacccaatcttaaaaaaaaaagaaaagaaaagaaagaaagaaaagaaaagaagaagacagaaagacaagctacagattaggagaaaatatttgaaaaccacatatctgacaaaagactagtatctagaatatatatttattttttaaagcctctcaaaactaaaaagtaaaagaaaaacaataatctaattagaaaataggcaaaaggccaggcatggtggctcacgcctgtaatccagccctttgggaggccaaggtgggtgaatcatttgagcccaggagtttgagaccagcctgggcaatatagtgagactcctgtctttacaaaaaataaagaataaaaaaattagctgggcatggtggcacacacctgtagtcccagctactcaggaggctgaggcaggagaatcgcttgagccagggaggctgaggccacggtgagtcatgatctcaccactacctgcagcctgggcaacagagcaagaccctgtctcaaaaaaaaaagaaaggaaaggaaaggagagggcaggggaggggaggggaggggagagaaggggaaaggagaggggataaaggagaggagagaaaggaaaggggggaagggaaaggggaaaggaaaggaaaagaaaggagaggagaggagaggagggggagggggaggggaggggagggaggaaggaaaggaaaggaaaggaaaggaaaggaaaggaaaggaaaggaaaggaaaggaaaggaaaggaaaggaaaggaaaaagtctggggttggcagatgccagacacagaatgttcataattaattacgtcatcctaattcagtcccaagccccttccagctctctctctctctgtgtgtgtgtgtgtgtgtatgtctgtgtgtgtgtgagagagagagagaagatagggtttcactgtgttgcccaggctggtcttcaactcttggcctcaaatgatcctctcaccttggccttccaaagtgctgggatgacaggcgtgagccattgtgcccagccccttccagctttgttctgtcatttcagtatttcagtatttcagtttgtcagcctgagcctcagcctgtctcccctcataggcacaaggtggctgccacagttccaggcatcacatacaaagaggacaacactaacaagaggaaaatatgctccctttacctttcttcagagctgagctctaaacccaacaggttttatttcacagcctgtgccctccaacattttgccatcctgaagaaaggacaagaggcagcactccaatcaccactccattctgatcactagttccaggcctttcctcgtctttgggtatctccttttctttcctttcctttcctttctttctttctttttttttttaagagacagtctcactctgtcactcaagctggagcacagtggtgtgatcatagctcactgcagcctcaaactcctgggttcaagcaatcgaccctcccacctcagcctcctgagtagctaggactacaggtgtgtgccatcacacttggctaattttttaaagtttttctgtagagatggggtcatgcaatgttgcccaggctggtctgaaactcctgggctcaagcgatcctcctgccttggcccccacaaagtgctgggattacagacatgagcctctgcacctggcctacctttgggtattttcattttcatttttagttttgaatataaaatatttgagacccacaaaagaatatttgaagtgcacatgagtcacgcatcttaatgatcaatgaatatttataaacccatcactcaacttaaatcctagaacatcataatactattggagctacctatgtgtccttcctgacttttttttttttctttgagatggagtttcactcttgttgcccaggctggagtgcaatgatgtgatcttggctcactgcaacctccacctcccgggttcaagctattctcctgcctcagcctgcatagtagccaggattacaggcatgcaccaccacgcccagctaattttgtatttttagtagaggcagagtttcaccatgttggtcaggctggtttcgaacccctgacctcaggtgatccgcccgcctcggcctcccaaagtgctgggattacaggcgtgagccaccacacccggcctctgactttttgttttgtgttgtgttatccttccattgatttttccttctgtttaaccacactagagtgggtcgttttgttgttgagccttacaaaaatgttattttattatatgtagtcttctataggttggtgtttgaactcaacattgtattcctgcgtctgttggcattagatgctaagacagagctaggggtgtgaagttttttggtaggtgatgcctaaagaaatacaagggggaggaaatagaatctggcaggaggagcctgagaccatgatgttgatctgattcatctgggagaggaaaaaggtgaggtgggattgggcagggaaaggctcagaatgtgatattattttttttcctgtagacacggagtcttgctgtgttatccaggctgttctcaaactcctggcctcaagtgatcctcccacctgggcctcccaaagtgctgggattacaggtgtgagccaccatgcctggcctgaataagatgcatttctggcaatgttgaccaatgccacagggagctcagaacacaggtcattcattagaggagcctcccattgggtaggcacggcctgatctgagaagccatgctcaataatcactgatgtcttccccaggtcttggctcaaaagctgatgcagatcctgaaggcactgccctgcttgcaacagaatggcacggtcttttttgaagggatggctgggctcagtggctcacacctgtaatcccagcactttgggaggctgaaagaggctgatcacttgaggtcaggagttcaagaccagcttggccaacatgaggaaaccccacctctattaaaaatacacacacggccgggggcggtggctcatgcctgtaatcccagcactttgggaggctgaggtgggaggatcagctgaggtcagaaattcgagaccagcctggctaacatggtgaaaccctgtttctactaaaaatacaaaaaattagctgggcgtagtggcacatgcctgtaatcccagctactcgagaggctgaggcaggagaattgcttgaacctgggaggcggaggttgcagtgagctgagatcgtgccattgcactccagcttgggcaacaagagcaaaactccgtctcagaaaagaaatacacacgcctgtaatcccagctacttgggaggctgaggcacgagaattgcctgaacccgggcggtgaaggttgcagtgagccaagatcatgccactgcactccatcctggtggcactcctctttggttgccacagtgctaagatttatccatgtggaaatgtgtggtagttcatgttcctgctgcatggtattccacacccctcatttcagtgattcatttgttagcagctatttgggttgattctaattttttgctgttacaacaaacactgcaaagaatattctttttttttttgagataggatcttgctctgtcacccatgctggagggcagtagcttgatgatgacttactgcaacctccacctcccagggctcaagcaatcctcccacatcagcctcctgagtacctgggactacaggcatgtgccaccccacccacctaatttttgtattttttttttaatagagacagggtcttgccatattgccaaggtttgaactgctggcctcaaattatcctcccaccttggcctcccgaagtactgggattacaggtgtgagccacctcttcttttttgagatggagtctcactctgtcacccaggctggagtacaatggtgtgatcttgtctcactgcaacctccacctcccaggttcaagcgattctcctgcctcagcctcccgagtaacaggtgtgagccaccacgcccgaccaagtcacctttttcctcaaagaacattcttgtaccacctgtgtctctattgcatgtgtataagagtttctgttgatatatcttagatttggaatttctggctcatgcaatctgcatatattcgacaagatagtgccaaaatgttttctattagattctttaacacagcctttaaccttgtactacattcctcttttcatttaagctagcttgagtgggtttctattgcttgcaattctaacctacctaactcatcaaaaatgactttttgatgacaactctgtgacattcctcccaagaggtccccaccctgacaatagtcacctcaggtttagaactacaggaggttatgggtgaatgaggcacaaacacaagtttgacacgtccttagcaatacactcacactggctggacacggtggctcacacctgtaatttcagcactctgggaggctgaggcaggaggatcacttgagcaaaggaattcaagaccagcctgggcaatgtaaaaatgtaaaaaaaaatgtaaatgtaaaaaacaaaatgcaaaaaataaaatgtaaaaaaaataatagtaggccaggtgccgtgactcacacctgtaatcccagaattttgggaggccgagatgggtggatcacaaggtcaggagtttgagaccagcctggccaacgtggcgaaaccctgtcttctccactaaaaatacaaaaatcagcctggtgtggtggtgggagcctgtaatcccagctactcaggaggctgaggcaggaaaattgcttgaaccccagaggcagaggttgcagtgagccaaacttgtgccactgcactccagcctgggagacagagtgagactctgtctcaaaaaaaaaaaaaagtagtaaaaagactttttaaaataagataagacatacactcatacatgcagatcctcggtccatgatgatgccattttcctgctgctctgacccaggcacagcctccctctggacatcttattagttggcctaatgactgcttgtgatgtttaagtcatttgcaattaaatcttccacaacttgtaactgaaagcatccttagtgactttttcactcttcattcattctttcatattcttactctctgtccctccctctttctctctccctttcttctttttcttttctttttttttcttaaaggaggggtcagctggatgcagcggctcatgcctgtaatcccagcactttaggaggccaaggtgggtggatcacttgaggccaggagttcgagaccagcctggccaacatggcaaaaccccgtctctaccaaaaatacaaaaattagccagcatggtggcacacacctgtagtcccagcaactcaggaggctgaggcaggagaatcgcttgaactcaggaggcggaggttgcagtgagctgagatggcaccactgcactccagcctgggggacagagtgagatcctgtctcaaaaaaataaaaataaaaacaaaaataacaaaaagccagggtctcactccattacccaggctggagtgcggtagtgggatcatactcactgcagcctcgacctccctggctcaagtgatcctcctgcctcagcctcctgagtagctgggactacaagtgcacaccaccatgccaggctaattttttttattctttattttttatagagattggagtcttgctatgttgcccaggctggtctcaaactcctgtgctcaagcaatcttcccaggacggcctcccaaagtactgggataataggcataagccatcctgcccagctttctctctcctctgtctcacacacacacacacaaacacgcacacacacacacacacacacacacaaacacgtacagctacagtcacatatgcagacaagtggcgttcagtcattaataaagtcacatatacaagcaaggtcaatgtcacagacaaatttcttattgtttgttgtcacaaattgtataaaaagaacaagagcaaacattttttgggggcttcacaaacaaatagggatctggaggtggtaatctaggcaaggtagttggtgcatacatacctaaggtaatggatggtgctatggtttgaatatttatctcctccaaagctcatgtggaaaccaaatccccagtgtggcagaattaagaggtgtggcttctaagaggtgattggattatggattcgtggactaatggattaatgggttgatgtgttactatgagggtggcactggtggctctatttatttattcatttatttagacagagtctcgctatgtcacccaggctggagcgcagtgccatgatcttggctcgatgcaacctccacctccagggttcaagcgattctcctgcctcagcctcctgagtagctgggattacaggcttgagccaccacagtcagctaatttgtttgtattctcagtagagacagggtttcactatgttggccaggatggtctcaaactcctgacctgaagtgatccacccaccttggcctcccaaaatgctgggattacaggtgtgagccaactggtggctttataagaagaggaagacagacctgagttggcatgcttggtgccctcgccctgtgatgctttgcaccaccttagggccctgcagagtccccaccagcaagaaggccctcagcagatgaggcctctcgaccttgccgttctcagcctccagaactgtaaggaataaattccttttctttataaattacccagtttcagatattctgttgtaagcaacagaaaacagactaaaacagacagatggcaggtgggtctcaggggcagacacacgggtctccactggccacacacttcaggtcccaaatagagaggcagaaaaggccaggtgtggtggctcatgcctataattccagtgatgtgggagggctagcagggaagatcgtttgaacccagaagttagaggctgcagtgagctaggacctcaccacggcactccagcctgggtgatagtgtatgtctctcttaaaaaaaaaaaaaaaaaaggagaagggaaggggaaggttcaagacagtggaggcacgaggagccccagaactctgttggggagacactaattcgtgcacctgccatcctcccccaggacccaaaggacccgggtctgtcatcttcctcggggcctcctggagctggtgcagccagtggtggaggcggccccggggcctgggccttgctgaggctggatctgtgagcagaggagggcggtgtgtgaggcggggcctgggccaccacaggggaaggatgctgctcagagcccacagacctgggtgcccgggccccgaggactcacactggccccaagctgggagaggatgttgtggagggtgtgaaggagctggtccaggacatcccccagggccggatcagcatcagcggtgacctccaggaccttcagtgtcagggccagctcagcctccaaagccacagggcgctccctcacctgaagagaggtgagaaagagcaggtgagggggcgggtgaggggaacagatggggggaggaggatagagaggaacaagtgaaggtgacaagcacaggggagagggcacagccagtgtggtcaggtgggagtagagggaagggggagcaggtgtggggagaggagagagggacaagggagaaggagaagatgaaggggccactacagagccaggtgagtggggctgggagagcaggggtgggcctgactccccctctcacctgcagctgcctcaggtcccaggtcctggggaagaggcgggagcggcacctgcagtccttcagcagaagcgacacttcctagacagcaaaggcacaggttagccccagcaggaggggtggaggttagaccactctgatgggattggaggatggctgacaacaggatagggaagttaactggtgggaggatagtagaggaccctcttctacagaagaacatgcgtcagtccctgcagtaggagcatgagatagcctactgcagggagggtggaggctagcccagtgaaggaagctggaggtcttcgctcaacaaagtcagcatggtgacccatagagggtgatggaggctagcccacggcaggaggggcagggggagactcacacaggcctcgttctgtctattaaagcctgagctgcatggacttcctgtctggttcctgcgcctttttcaccagggggatgcagtgtcctgggctccacggctttgggtctctattcagtcttattcaaagtctctggcttcggtctcttcttctggatctccacctgctgctctgggtttggctgtttctgatttccagctcggtctggggtatcattcctgcctgagctccagggcacactgtttagctgggacagaggccagtcccacgggtgcagagcggcctgaggcaccggagggggtggggtgggggaggcccaggctggagaagtccagagcagggcggggccaggtgccgcagctgcccctggggaaagagaaagtgacacgtgcccgggccaggctctgtgttcgcctacaggaaggtgacttcctgaaccacacatgcctggggctgtagcagcttcagctcaggaggaggagccacgggtgcccccagggcaggactagggtttgagggggcgggtgaggggcttgtgtatctgcagattgctcagatgtggaggggggtggctgagggaaacccgggaagtatttccctgaggggtggaaggggggactctagaaggagactgcttagggtaggggagaccacccagggaaagggatactgtggggatgggaggacggagtcagtgaggccaagaccacagagtataaagaaaaggacaggccactttggtacgccaaggcaggaggatcacttgaagtcaggaatttgagaccagcctgggcaacatagcaagacccccgtcactacaaaaaaaaatttttttcgactagccaggcatggtggtgtgcccctgtagtcccagctactccggaggctgaggcaggaggatcacttgagccctggagttcaaggttgcagtgagccatgattgcaccactgcactgcagtctgggtgacagagctagacctcgtctcaagggaaaaaaggagagccctccctgcactcccaactctccccaacctgccatcagttggggggtgggggaggcaggaacaggggagtgacagtgtctactcaggaattcaggtacagctgagggcttcaaaggaagcaggttgattgtaacagacccattcctttattcattcattgaatctgtcattggttcaaaaagtatttattgagcaggaactatgggccaacactgtcctgtgcactgagggcccagcagagaacaaaatacacaaaattccctgtctctcgaggagctgacataccagtgggagagtcaggcagtaacaaataagttaaatatgtacaatgtcactgaaagaagcgcttttgagaaaaattatgctgcagatggagccggctgaacccagaagaagttgcctgctctaaggcagccagagaaggggacatctagttgaaaacctaaaggaggagggagggaacagcattctaggcaacgggaacagccagtgcaaagtgaggacaacgacaagtttctctaacggatgccaccctgtcccggaggctttacacatgcaagagcagtgaattctcccaacacctctgagaaaggtaccatgctttcttctaccttgaaaatgaagaagctggtactcagagaggttaagagacttggccaagtttacacagcaggtatgtgctaagagcagtctgagttttccctgacacccaggccttaacccctgcacctcctgccttcagaggttttgagtttttctttttttttttcttttgagatggagtctcgctctgttgcctgtcgcccaggctggagtgcagtggcacgatcttagctcactgcaaccttcacctcccagcttcaagtgattctcctgcctcagccttctgagtagctgaaaaccatgtgtattcctgggcctgtggatttggaagggcagggaaaaccatgtgtattttcatttggaagggcagggaaaaccgtgtgtattttcatacaggcatccgccaccacacctggctaatttttgtatttttagtagagatgggggtcttaccttgttggccacgctggtctggaactcctgacctcaggtgaccctcccacctcagcctcccaaagtgctgggattacagacctgagctaccgtgctgaccagaggtattgagtactttgaagatacttttctgagtccttggtcacctgaattctgcccatccagggagtcccttgaggaaacctgggggctgatcttgccatgtgcacatgtgctccgaaaccctcttgcccctccatcctcagcattattagatatggagactagtactggccaccaaacccaagactacattctctagcatcctgcatgctagggatgaccatgtgactaacccatcaccaccatctaggccttaaaacacagggtgggtggtccctgctctgtttcctattgtcaccactgaaaaactggacatgtctgagagccgaatcctgctgtacaggtgagaacaaactccaggacagggcttctaacctggcagaagaattcctgggcctgtggatttggaagggcggaaaaactatgtgtattctcactaacctctgtctgaaatttgatatttcctgaatgtatgtttcttacacctgctgtaacaaatgacccccaacttagtggggtaaaacaactcagactttccagggatggatagacggatgggcaaaatatagtctacacatatgatggaatatgattcagccttcaaaaggcagaaaattctggccgggtgcggtggctcccacctgtaatcccagcactttgggaagccggagcaggaggatcgcttgaatccaggagttccagatcagcctgggcaacatactgaggcctcgtctctataaaaaatttaaaaattagccagatgtggtagcacacatttgtagtgctggctactcaggaagctaaggcaggaggatcacttgagctgaggaatttgaggctgcagtgagctgattgcacaacagtactctagcctgggtaacagagcaagaccctgtctctaaacttaaagacagagagagagagtccaggcgcggtagctcatgcctgtaatcccagcactttgggaggccaaggccagtggatcacctgagatcaggagttcgagaccgacctggctaacatggtgaaaccccatttctactaaaactacaaaaaattagctgggtgtggtggcagacacctgtaatcccagctactcgggaggccgaggcaggagattcacttgaacccagcaggtggaggttgcagtgagccaagatcgcgccactacactccagcttgggcaacaagagcgaaactctgtctcaaaaaaaaaaaaaaaaaaaaagagagcaagaggagggaaggaagttctgacacatgctacaataaaaatgaactttgaagacattatgtcagtgaaataagccagtctcaaaagaacaaatgctgtatgattccccctacatgaggtgctgagagaagtcaaattcctagaaacagacgtgtctaaatatttgccggggtagcgggaggggttaataggaagttgttgtttaatgggtacagagattcaattttgtaagatgaagagagttctggagattgcttgccgaacaatgtagcaaacaccactaggaccagacctgtaatcccggcactttgggaggccaaggggggcagatcacttgaggtcaggagttcgagaccaacctggccaacatggcaaaaccccatctctactaaaaatacagtaattagccaggcatctgactggctaatggcacacacctgtagtctcagctactcaggaggctgaggtgggaggatcacttgagcctaggaggtcgaggctgcaatgagctatgatcatgccagtgccctccagccagggtgacagagcaaggtcctgtctcaaaaaaaaaaaaatagaataaataaataataaaattgcactactgaacaatgtgctttagaaaggataagatggtacattttgtgggtttcccacaattaaaaaaaatatttaaattacctgaacaaaaagaacaaaacaaaatgcatgcacatttctattcctacagttctgacagtcaagatgtcagcagagcgggttccttctggaagcagcaggggagatctctctcctttctcagcctctgggggtgtccagcatcccttgaccccggttcccttcctgacatcactccaatgtcctgtttctgtggttacatcttccgctaatgatgctgaccccggcctccttcttagaaggacttttgtgatgacattgggtccaggtggacaacccaggataacgcccccatcccaaacccttaacttactcacatctgcagagtccctcgtgccatggaacataacatattcccaggtccaggaatcaggaacatctctggggaccagtcttgcatctagcacgaatccattacaaatgcagcaacacaccacagcagtgttagcagaacttgtgactgttaccaaaagaaatcacaggcatttcctatcacgttatcttccagcaggcaccttgaaatgtcatttatgctcatctctgcttctaagtcacagtggttattaaagctgccacaggtgattttttacttaatgcattcatgaagaagcacatgaattgctatgtcacagtgtgaaaaaatattttgatcactgtattacaatcagagttggattcctttgtcctgcacgtgttctttccttctgagaagggtccgtaggcttttcaaggctgccgtgaggtccggtgggtgaagatgatgagggagccctgtcccggggactgtggagcacagaactgccaggaaccagggcccctggatgactgagtggggccatcctgccagggggagcgctcaccttgggaggaggagctggtggagaatgacactctgtggtttgtaattcatgatcactgtatttgggggactctttgttccagcagctcagccaactctactcagcaggggtccctgatccaagttgtcctcctcatctgtaggggcttatccagggttagtgagacctcatgtttgcttatacaattcaggggcttcttggaaagagaatgggctggacccggtgactcaagcctgtaatcccagttcggggaggggctggagagggtggaggatggtgccgaggagagagaatcacttgagcccaggagtttgaggctacagtgagatgtgatcacgcaagagacaggatcttgctgttgctcaggctggtcgtgaactcctgacctcaaacagtcctcccatctcagcttccaccagtagctgggattatgggcttgtgccaccacacccagccaattctctaattttttatagagacaggatcttgctatgttgcccaggctggtctgggctcaagtgatcctcccaactcagccacccaaagtgctgtgattacaggcttgagcaatcacatccaggctctaaattaattttaaagatgcttcatttcacccaatacatccaaagtgctatcatttcaacatctaatgaatatataaattataattaagctgttttacttttttttttttctccacagtaaatcttcaaattctggggtatgttttacactcactgaaaaaatgaggttgcaccacctacattccaggtgctcgatagtgacatgtgacctggggaccccagtggacagcacagactcaatgaacctgctgttctagatgctacttttagggtaatttgttatggcagcaatgcaaaggaaatacacaccaacgcacacacagtcccacgtcatgggtgtcttttcctcattgtttatttcaacaaggatttcaaaaagtagaaaaataaacattttcctggaggtgagttggatttacatacacaaatacataaatagcgactgggtgacaataaattaagccaagtggctaatttataaataaaatctcaggttgcatgactggcggaagggtcagacacacaggtccccgctggcaacacaattcaggtctcgcgtgaggaggcggaagaggttgaaggtgacagaggcctcgaggcagccaggggactcctgtagggaggaggggatgggtcaggggctgtctgggttctgggctcccagtggctccccagacctcagtccctctcttcccgggtcactcaccttttttggggcctcctggagccggtgcagccaatggtggaggcggccccgggtcctgggccctgccgtgggctgaggctggatctgtgggcagaggagggcggtgtgtgagccggggccttggccaggggaaggacgctgctcagagctcacagacctgggtgcccgggccctgacgactcacacaggcccggagctgggagaggatatggtgcagggtgtgaaggggctggtccaagacatcccccagggctgggtcagtgtcagcggtggcctccagaaccttcagcgtcagggccagctcagcctccaaagccacggggcgctccctcacctgaggagaggtgagaaagagcaggtgaggggggaggtgaggggaacaggttgggggaggaggatagagaggaacaagtgaaggtgacaggcacaggggagagggcacagccagtgtggtcaggtaggagcagagggaaggggtagcaggtgtggggagaggagagagggacaatggagaaggagaaggtgaaggggccactacagagccaggtgagcagggctgggagggcaggggtgggcctgactccccctctcacctgcagctgcctcaggtcccaggtcctggggaagaggcgggagcggcacttgcagtccttcagcagaagcgactcttcctagacagcaaaggcacaggttagccccagcaggaggggtggaggttagaccactctgatgggattggaggatggctgacaacaggataggggaggttaactgctgggaggatggtagaggaccctcttcttcaggaaaacatgagtcagtccctgcagtaggagcatgagatagcccactgcagggagggtggaggctagcccagtgaaggaagctgggagtgggaaagcatggtgacccttggagtgcgggtggaggctagtccatggcaggagggcagggggagactcactaaggcatctttggccctcttaaaggcctgcagctcctgtggagacagggacttgaactgggctatgtggcagccccttgcatccgggagagccccgcggagcctggcgacaggaactgctccagtcacggtcagcactgcggccatcagcaccagcactggcatgcagtccccggtcatgtctgtgtcacagagagaaagggagctgagggaatgcagaggctgcccactgagggcaggggctgcaggagctgagcacggacagagatgtgggactcacctagtttcattcctgatctctggtctttgtcagcagaagaaacactctgaggctgtcacccagggtctgtttgggtcttgtctggagtctctgttcttttcagtcccctcttctggatctcagactgtgtcctggctttgactctttctgtcagttttgagctctgtctgggatgtaattcctgcctgagctccatggggcagcttttatccctgacagaagggcagtcccagctgatgtaggaaaagtgaaaacacagcctcaggtaagacaccggccaccaggggagccccaggctgggaaagcccagagcagggcagggctagtgagccagatgagcagctggagggaaagagaaactgatggagactcaggggtaacctacaggaaggtatgttcccaagaggattccacctgctctggttttgttgttgtttaagacagggtctcactctgtcactgcagtgcaatggcatgatcacagctcactgcagcctcaaactcctgggctcaagccatcctcctcacccagcctattaaagtgctgagattacaggcctgagccaccactcctggcatatatatatatatatatatatatatattttgagacagggtcttgttcggtcacccaggctggagtgcagtgcaaaatcttggctaactgcaacctccgcctcctgggttcaagcaattctcttgccttagcctcccaagtagctgagattacagatttgtgccaccattcccagctaatttttatatttttagtagagatggcgtttcaccatgttggcaaggctggtctcaaattcctgatgtcaagtcatctctctgtctaggcctcccaaattgctgggatttcagtgtgagccaccatgcccagaggccaatatttcttaattgcccaggcaaggaaggactcaggaatatgaggctctgctcaagaattgaggtgtgacgaaggacttgaaggacaccacgtgggtgccgtctttcttagggaagttcaggcagtggtgaagagcatgggtcttggagatgaagggtctggggttcaaacctggttctgaccctcactagccgtgtgaccttggcaaggaggggtgcattcagcaacgcagattgctaatgcacagatttggagaaaaaattaataacacaattgtttgtgtatttatgtgagtgattatttaatagaatccactcattaagaccatactaggacctcagctggagagtttaaaacgtgatctcaacggacactactcctccacaaggcaagtatgctaacccatcctataggtgaggaaacagaggctcagaaaagtaatttgccctgaattccactgtaattaactggcagggtcagaactgaaactcaggccacctgagtccctggctcggcctctttttttgctgtaaggtgcacctcacaatcatcatacggaaaacaaccaatgcgatcaaaacactctttgataactggcaataaatttaaaccgggagacagaatagcaaatgcacaggaacttcacaaatacaaacacacgtaagggaatccaaagaaccacagtcggttaaggacccttgggcctttcactaccaaatccctcatggattggtgtcccttagatgccggatccaagagtcacggattcacagaatctcaaagctggctgtggggctacaaatccggggttaggacctggtgttgggggtgtcctggtaaccacacaaggaggaactggtccctgttgcctggggtcagccacggtttccagagctcaagttttttcctgccacagcaaccgttggagggtcgtacaatgcaccccgaggaaatatcgtggcttcctggagaactgtggtctcttccctgtagaaggacccgctcctcttatatctgagacagtggatccaagtcaggcccaaggctgcgaagaagttttcgtgcctcagcacccattgactgagagcctcgcccggccagcccaatggacgacaggagctgctttcggcagccaatggcgtggaggtttccgtgctgccagagggggcggggtcagaggcaaggcccagagtgtgcagccagccggagctcccacgtgagcaggcgcaggaggttgaagaccacgctggctttgcggcaccgaggcgagtcctggagccagggagggagggcagcggggctaagccaggctcttccccccgcccccggaatccccctccagtcccgctgctcgcagcctcagtcccgtccttgtcagcctcgcctggtcctccctgcgggctaaccctgtattgcctgttgcactcaccgctctccggggtttgtgacgcctcttctgggccccggggaccttcctggaggagcctggccgtgccagctcaagctggaggtgggacatgaggcaaatggaaaaggcgaaggacgaagcccctctctgcatctgcccgtggccctcccagccgcagactcgagcccggatttcaggacacccagaggacccgactccggtctggatgggtttttccgctaagcaggacagattggcaaagcgctggggctcgccgtgggcctgaggatgcagagaagctggcgggggagaggggcggcggggcgcggccgtcactcacgcaggccgccacatccctccccgcggccgccagcagctccaggatcgggccggcgccggggagcagctccgagcggtgcaggccgctgagcactgcctgggcgtccgcgatgccccgggccacgtggcggagccgagcgcaggactgcggggacgagagggcgttagagcgggccgcgcccgggccatgcctctcccgcccactcccgggcctcaccgatggccgcggaggatccctcctggggcggaaggagcagttgcgctgcccccagctcagcgcctcttcctcctgcgggacaagcggcgcttatcgcatacggctaggccccctcgccagggcccctaacctctgcacagtctgggattcctggacgtggatgggtactggcagcgcacggtcgtgcctgtcgtgtactgaaccagggagctccccgaaggcgcgaaccagggttgaattgcactccgcgctcccccagcaaagcccctcgccccgacctggagccgagtcctcccggcagggctcccttctgtgattgaccctgagcctgcgttcgcgctgacgacggggactgcgggggtctcgtggtgggaattgtgggcgctgacataggagaggcgcctgctgggcgctaggacgcaggaccccttgggacaggaacgggtgtatgggaacccggtggggccagggtcccagggggcacaggggctgggcggtgacttacgtagcggtccctcagcgccttggcagccgccagcgtccggggctccagcgagcggtagtgcgagagcaggcagcgccggggggccttctgcgatcaccgtgcacaggacccacagccccgcggccactgcggcccagacactcggccgcatctctgcttctgcagcaggcgagagacgtcagggaagccaaagagagggtccagcgcgtccagccccccgccttgggttaggatcccagggaaggcaatgctcggagcgtgaaggcacagcacacacagtgggagagagagtgggagccggccccctcctcgccttggcctctgccctcactcctgtctgcagtgcaccctctgtgcctcgtgctgcagcaggtgctgccgtccactgtcccctgggaggcgtccagagccgtctccacctgggcaacagtgcctcgacggtccatgctggcttttatgcgcagggctgagaatggggtttgcagccgggctttcccgtccagggcaagctttcccaacatcagagctggccccaggcctctgggatcccagtcgggtgtgaggacttcaacccgaggttggcctgtgcccgggatggctgccctccaacactcggtttccaaattgtctctgtccctgtttctactgtctgtttcctctttctttgcttcaccctggttgtctttatcttcgttctgcaatcacaaccagcccttgtgtagtgttgactgtgcatcaggctctcttctatgtaattgacacagacatatcatctcatttttgtaccagggcagccctggaggtgtagctgagaaagagaacgcttaatttattttattttattttattttatttcagagacagagtcttgctttgttgcccagcctgtagtagtggtgcagtcacagctcacttcagactcaacctcccaggctcaagcaatcctcccacctcattctccatagtagctgggactaccggtgggtgccaccaccattttttgtagcaacctggtttcgccatgttgcccaggttggtctctaacgcctgagctcaagacatctgcccgcctcagcctcccaaaattcttggattacaggcatgatccattgcacctggcctcattattttcttaaaccgtttttttctagtctctttatctatgggtgcattgattaaaagaactgcagatgcccgaaaggccacacgagcttcaggacgcttcctttgcttattactggaggaagaaaaggctggggcaaaacaagtgcaaaccagacacagtgacccacggttacctttagatcattaatatataattatcatggtaaactccctacccatggaggaaaatacgctcaccatttgctgaacatacatcatatgaagaggcatgcttatgatctgcacctgcgtctggagttgctctctgcgcatgcttacatacctccccaccccacagctaactccttaaaatttcccagctccccacagctgggcgataaggtgttttttgttttttgttttttttgagatggagtttcacccttgttgcccaagctggagtgcagtggcgtgatctcggctcactgcaacctccacctcccgggttcaagcaattctcctgtctcagcctcctgagtagctgggattacaggcacatgccaccatgcctggctagttttttgtagttttagtagagatggggtttcaccatgttggccaagctggcctcaaactcctgacttcaggtgatccgcccgccttggcctcccaaagtgctgggattacaggcatgagctcgcccagcaataaggtgtctttagagcaagagttctctccttccccatcctagctaggaataaaacctgcttgcctttttgtttccaattgggtgttctttctttgcaaccaatgcagagtagggaaagaactgcatttacaggtgacaatttcattgtcaaaaatgacacaagcccgggtacagtggctcaggcctgtaatcccagcatgttgggaggctgaggagggaggattgtttgagcccaggagttcgagaccagcctgggcaatatagtgagaccctgtctctacaaaaagtaagggatttaaaaattagctgggcatggtggtgttactggaaaagcatcctgatccagaccccaagagagggttcttagatcttgtgcaagaaagaatttggggcgagtccacagtgcaaagcaaaagcaagtttattttaaaaagtaaagtggtggctgggtgcagtggctcacacctgtaatcccagcactttgggaggccgaggcaggtggatcacttgaggtcaggagttcaataccagcctgaccaacatggcaaaaccctgtctctactagaaatacaaaaaaattagccgggtgtggtggtgcacacctgtagttccagctacttggaaggctgaggcaggagaattgcagtgagccaaggttgcgccactgcactccagcctgggtgacagagcgagaaaaaaataagcaaagtggcgaaggaatagctactccatagacagagtagggtgttcctgaaaataagaggaggaatgggcccaccctaggtacaatgcttgtttataacaaaaaatatcatggggagatgtgctctgctaccagggtttgtgacaaaggattaaatttcttaattatcatattttgcaaaaaccgatattactatctttaaagcaaaacgaggaatgcttctgatgaagaatgcttctgttctcaagataccgagatttcaggacattcctgagcctgagtctctttagtaaatgttatcaatctgttccattaacagtaaacatctagaggctaggaatgcctaacttcctggaaatgcagctcagcaggtcccagcctcctttttcctagccctcactcaagatggagtcgctctggttcaaatgcctctgacagtggcacacacctgtagtcccagctactcatggggctgagatgaaaggatcccttgagtctgggaggttgaggctgcagtgagctgtgattgtgccacggcactccagcctgggcgacagagtgagagactgtctcaaaaaaaaaaaaaaaaaaaaagacacaaaccaggcacagtcgctcatgcctgtaatcccagcactttgggaggccgaggtgggcagatcacctgaggtcaggagttcgagagcagcctgaccaacatggagaaaccccatctctactaaaaatacaaaattagccaggcatggtagtgcatgcctttaatcccagctattcgggaggctgaggcaggagaatcacttgaacccgggaggcggaggttgcagtgagccgagatcacgccattgcactccagcctgggcaacaaaagtgaaactccgtctcaaaaaaaaaaaaagacacaaaagggaggttctattaccttattttacagatggaaaactgaggcccaggaaagtaaaggaactgttccaagatacacagctaataaatggcagaggtggggtttgaacccacacactctgcagtttcaaagcttgttctctatgccataactgcccttatctttttcagcgtctcctcctgtgtcttgctttctctttctctctctctctctgttcctgtctctgtctctggcgtgactccatctttcttattcatttttccaacaagcatcctgccccaggtcgctctgtctgtctcaatcaatctctttttgtttaaacataaaatctacttctttttctgataaaattagccatgcatgttcagtggataaagcttgaaaaatacacaaaaacataaaagaaaaaaaacatcacctataacttcaccatcctcctctcatccctcatcccacttctggaacaaatcgtcccaatacataggaattttccatgtgtttatttgtgcatatgttttctgactaccaaagtaacacttgttccttgtaaaagattccatccatacaaaaacatacaacatggagagttaaagtaagtcttgtatttcacctcctggaggtaaatattttttaacaatttgtcactgttcctccttttgttttcctttctgtgagcaatttcacccaaattggaaccatgctgtatacagtttggtagctggctttttatgtcttaccattatctctcatttgcattctcccacatctttaattatagcgtatcagttagggcccagcaggaaacagatggcccgtcaatttaggataatttgaggtggggttgataccagaagcctttataaagcgattggatagtaaaggcaaatgacaagagctagtgcaagctcctggggccagcatgggtgaggggcctcatccacaggcctaaaggaaggggagagggttgagggtgtgcatgtggttgcctgacttggggaggagagagtcacttagatttgtggaggaaacagatgaattgtggtggcccagcacagggaggagccctggggaaaaaacacctgacctcctctcccctctacctggggcccagagtaggttggagaagcagggacagtagataaggaggggcaaacggaagacatcccccacccccacaccactattagagcttccattccagcaggatcatttaataaccaacccctgattggtagggtggcaggtttttcatttcctcaacagtgtcttttgcagagcagaggttgctttttgtttttgtttttttggacatggtctcagtctgtagcccaagctggagcatagtagtggcacaatcgccactcactgcagcctccatcacccaggctcaagccatcctcccaccccagcctcacaagtagctggggcgccagctacctgtagtaggcacgtgccaccaggcccagctaacttttctttttttccccagagatgcagtctcactttgttggccaggctggtatgtttccattccaacattcttgagatgacaaaattatagaaatggagagcagattagtggttgacagaggttaaggaaggggtcggatgggagaggagtggacgtggctactgaaagggcaacacaagggatcttgtggtatggagtgttttgtatcttgtctgtatcaatgtgatatggttaggctttgggtgcccacctaaatctcatcttgaattgtaatccccaggtgttgagggacagacctggtgggaagtgattggatctgatcatgggggtggttcccccatgctgtccttgtgatagtgagtgagttctcacgagatctgatggtgttttaagtatttggaagttcctccttctttcactgtctctctctcctgccaccatgtaagaggtgcctgctttcccttccatcataattgtaaatttcctgaggcctccccaaccatgcagaactgcgagtcaattaaacctctttcctttataaattacccagtctcaggtagcatcttcatagcagtataagaatggactaatacacaatgtcaatattctctatgtgatataataccatggttttcgcaagatgttaccattgggggaaactgggtaaagggtacacagtaactctttgcattcttttttttttttttttttttgcacgtttcatttgtttattgatttccgcctgattactccagaaggtaattacttaagatgcttaagatgggtgggggggtgatttcagcatcgcccaccttcacctgtgggaagacctccgagcatgtacagtaagacacacagtcatatcttggggagctctctgcaggtgaactgcaggcccccagccccatgctgggtaaagtaatgaagcaacagccgctttcctaagcccgagtgacccaagctacttctgcgcaggttgtgaaacagggtttaggtttctcccctcttggacaagaggccaggggtctgccccatcagcctgctttcctggtgggtcacggaccatcatcacctggctggtctggaagggtttaaccacagcggatcatgtggcgaccagagccggggcagctgtcaagggcagcctccatttccattctgtctcgtaagcagcctgggagatgtgggcctaagctttggtgaggatgagagtctgtcttgaaattgggccccacaggggtgagtccagaggcaggaccgggaaggaaaggtcgaaggtcgggcgtaacatcattcaaagaccagccacgcccagaccacacccctgagatgccttatcaggtgagcaggaggctaagtcagccgacagtgtggccacacagcccaagcctgtcctagcagaaggcaggaaccatcagcaaataagtgacttttccaagaaacaagatcttgttcagagctgcggccttgggagccttgatgtttcagccattgtgccctgccttcctgtctcaatgtccaggtctcgaattccatggtagaatggccagtgtgtggccttagtgccgtggccatctggggtcggtgtgggctgcccgcctagtgcgcctgggaagcagaagtttctttgcctttagggacaaacttcagcgagctgctgaatattcattcagaatcgggactgccgcagcttggggccatcgttcaggaacttgtggctcaacgtgttgccacacttgcacgagacaccttcaagacttcaggatgattgtgctctgggcgcttggccacgctgtcagaacggatggtcttggtgaacaccggccaggggaatgagtatgtgtactttgagcggctgggaaacagctcatagccacacttggcacacatatagacgcctggctcaaagtgattctggaaaaccttgcccccgaagaagctgcagaatgacatggcgccgccaggaccactgtgcacttgccccctccaacagacccaaggccgctgaccccatgaccactgggacccgcgcccacctccctgcacctcccaagaacctatctctttgcattatttcttacaattgcacgtgaatccacaattatgtcaaagtaaaaactctaattaaagcaatcatacagacatatttccttgggaaatatgatttcctaaatcatgatttcctaaatatgatttaggaatatgattcctaaatatgatttcctaaatatgatttcctaaatatgatttcctaaatcatacagacatatttccttgggagctatacatgcattatgcaaatatataaaatatggataatatataaaatgtttagaaatgtataaaaaagtgtgcaaggatatgtcccaaactgattaatagtgagttatttatcactggagagagcatgggaactgaggagatgatcactggaatatttaaatgtattagcaatattttaatttctttttttttttttttttttttgagacggagtcttgctctgtcgttcaggctgccgtgcagcggcatgatcttcgctcaccgcaacctccgcctcccaggttcaagcgattatcctgcctcagcctcccaagtagctgggattacaggtgtctgtaaaaattagccaccacacctggctaatttttgtatttttagtacagatggggtttcaccacgttggccaggctggtctcgaactcctgacctcaggcaatctgcctgcctcagcctcccaaagcactgggattacaggcatgagccactgcgcctggccgtattttaatttcttacaaggagaatgaattctgcctaactaaacagtaaaacaaacaaactcactggatatgagggaaatggtagctcactgcttcttcagttgctggtcgggtagatcatttgtgagactttcttaaaaagtacattaatccaatttctagagcttctctttttgtttttttgagacagagtctcgctgtgtcacccaggatggaactcagtggtgaaatctcagcttactgcatcccaggtacaagcaatcctgctacctcagcctcccaagtagctaggattacaggcacccaccatcacacctagctaatttttgtgtttttagcagagacggggtttcgccatgttggccaggctggcctggcactcctgacctcaagtgatccacccaccttggcctcccaaagtgctgggattacaggtgtgagagtccctgcaccaggagagactggcctctagagcttctgataatggctttgtaaaacgttgtccttatcctctgccactttgctgctgtgtgggtgttcactgacccctcctgatctgcacctctgaggcttgcctgccctcttgcttatggttggtgtttagccagtggaggtgctggcaggagattgagggagggcagagagcaaggtgggggtgtttattctcctatttgctggctgccccctgcaagtctggagttagacagtggccgtgatcctctatctacagccacagtctttgtcctgtcatgcctaggagtgctaacagctccccctgttacttgcctctgggtgcaccaccacctcttgtgtcttccttaaccctgcccacttttcccgtgcttaaatgttcaagtaggtcatctacttcctgaagatttctattttttttcccctgagttttcttaatagaaatgtttgagactgaggtcattaaagactcacatgctgctataagcaaaaattcaggctaggcttggtggctcatgcctatgatcccaacaatttgggaggccaaggcaggaggattgtttgagtccaggagttcaagaccagcctgggcaacatagcaagagcccatctccacacacaagatataaaaattagctgggtgtggtggcacccacctgtagtttcaactactcaggggcctgaggtgggaggatcacttgagcctgggaggtggaggctgcagtgagccgtgatggtgccactgcactccagcatggtgacagagcgagaccctgtctcaaaaagaaaaagaaagaaagaaatattagagattctgtgcaccctttatccagtttcccccaatggtaatatcttacaaaatgctagtccaataccgcagccggatattgacattaatacagtccacccatcttattcaaatatccccagttttacttgcattgagtgtgtttgtgtattcttgtgtgtgtgtttagtcatacagtttactgtatacaatttagttatataatttcatcacatgcttaggttcatgtatgcatcaccacagtaaagacagaagagttccatcaccatgaatatccttggggccatgccatctttttttttttttttttttttgagacagagtcttgctctgtcgccaggctggagtgcagtggcgagatctcagctcactgcaacctccacctctcaggttcacaccatgctcctgcctcagcctccagagtagctgggactacagatgcccgccgccacgcctggctaatttttggtattttttttttagtagagacggggtttcaccgtgttagccaggattgccttgatctcctgacctcgtgatctgcctgcctcggcctcccaaagtgctgggattacaggcgtgagccaccgcacctggcccttttttataaccacacccaccttcctccctccaccatctttccctaactccttgaaacaactaatttattctccactttcaaatttttctcatttgaaaaatgttatatagcccaggtgcagtggctcatgcctgtagtcccagcactttggaaggctgaggtgggaggatcacttagagcccaggaatttgagaccagcctggacaatatagggcaaccctgtctctacaaaaaatacaaaaattagccaggcacggtggcatgttgtagagtctagccccaatggcctgtgggttttttctttgtgtgcagagacgagagattgtaggaaaataaaaacacgagacaaagagatagaaggaaagacaactgggcccaggggaccactgccaccaatgtgcggagtctggtagtggcctcaaatgcctggacgcactgctatttattgtatacaaggcaaggaggcagggtaaggagtatgagtcatgtcaagtgattgataaggtcacgtgagtcacgtgtccacatgacagggggcctttccctttgtggtagctgaggcggagagggaggacagcatacgtcagcattttttctatgcacttatcagaaagatcaaagactttaatactttcactaattctgttactgttatcttctaagaactcaaaaagaggagccaggtgtacaggcggaacatgaaagtggacaaggagcgtgaccgttgaagcacagcaccatggggagacgtttaagcctccagatgactgcgggcaggcctggctaatgtcaggcctcccacaagagctggtggagcagagtgttctctaactcccccagggaaagggagactccctttcccggtctgctaagtaacgggtgctctcccaggcactggcgctaccgctagaccaaggagccctcaaacggcctttatccgggcgtgacagagggctcacactcttgtcttttggtcacctctcacagtgtccctttagccctgactctgtacggcctgttttctcctaggttataattataaaacagaaattactataataataaaacaaagagtaatactacaaactaatgattgataatattcatatataatcatatctatatcctatttctagtataacttttcttattataattattttctttattatactggaacagcttgtgccttcagcctcttgcctcggcacctggatggcttgccgcccacagcatgtgcctgtggtctcagctactctggaggctgaagtgagaggattgcttgagcccaggaggtcaaggctgaagtgagccatgattttgcaactgcactccagcctaggtgacagggcaagactctcaactttaaaaaatgtgtgtgtgtgtgtgtgtgtgtgtgtgtgtgtgtgtgtgtgtgtatgataatgaagtagtatgtaaccttctgggatgggcttttttcactcagcataattctctggatattcatccaagttgttgcatgtatcaatagttcattcctatttgatggtatatatttgccagaatttgtgtaatcatgcaccttttggaggacaactgggctttgtagtttgggctattacaaataaagttgctgtgatcatttgcaaagcaaataactatgttattgcatggacataggtttccatttctctggaataaatatccaggcataccattctgggccaactaggagttgcatatttagttttacaggaaactactgaactgtgtttcagaatggctgcaccatttttccattcccaccagcaatgtatgagtgatccagttcctagatcatttttgagttatactcacaaataaatgttctccaaagctttttattatttcttaaattcctgaagtagtgtttctaacagactaggggtctcaagcagtggatcacaagacacatttctattgggacagcattaaattgaattttttattgcacataacctgctctgtggtggtcagagctggatcactgattgtcaataatttgcatctggcgctttcctccaaccaatctatgacactccgttctttctgccattactaattttccttctagttcttcagtctttggacatatataattttatttcggcctcatggtatctatcagttaggacacttttggttgtaaataaccaaaaactcaactcatgctggcttgaacactggagaatttttgagcttacaaaactgagaagcctagggttagtggtgaggcttcaggttaagtttgatctagcagcttaagacatgagtaacctcccagttggttagttgtctgtttgtttgtttgtttgttttttgagatggagtctcactcagtcacacaggctggagtgcagtggcatgatctcggctcactgcaacctccgcctctagggttcaagcaactctcctgcctcagctccctgagtagctggggttacaggtgcacatcaccatgcctggctaatttttgtatttttagtagagacggggtttcaccatgttggccaggcctgtctcgaactcctaacctcaggtgatctgcctgcctcggccccaaagttctgaggttacaggcatgagccacggcacccagcctcagtttgtttgcttgtttgtttttaaatatttcaggtctcccttatgctgatgagaagcctgtttactcttgtaaatccaacatgggtctagcagcatcccaggcttcaggcttcaggttttatttttcttcagtagataaaaaaaaaaaacaaaaaaacagcatctttttcccaagatgttcaggaccgaagatcattctgattgaactggattaggtcacatgcccaccacaaacccaatcactgtggctaagaagacaaactgatgtaaatggctacagccagatcacataccccatcccagggatggggagggggctaaatcatcttcccaaaactatttagctccccaactgaaatgggggatctcaggaaagactggggagaggtgatagaagcttggaaattatattccatggacactttttgaaatcttttttttttttttttttttgagacagggtctctctctgccacccaggctggagtgcagtggcacaatctcggctcactgcaacctccccatccctggatcaggcagttctcctgcctcagtcccctgagtagctgggattacaggtacgtgccacctgaccagctaatttttttatttttagtagagacggggtttcaccatgttggccaggctttgctggttcttaaaacctctatgcctttgaataggaaaatatgcactggcaaaccataaaataattttctcatactcatgctgaggaagacatataaccatgaaaaacagtcactacttacccataattatcaatatttatataaacctaattagaattaattaaaagtggtctcaagtaggaagcgtgcctgacttactcaaaacatacctagggctgggtgcagtggctcacacttgtaatcccaacactttgggaggccaaggcaggaggatcgcttgaggccaagagtttggaccagcctgggcaacatactgagatcctgtctctacaaaaaatttaaacactagctggcatggtggtgcatgcctatagtctcagctacgtgggaggatcgcttgagcccaggaggttgaggctacagtgagctgtgatcataccactgcactccagcctgggaacagagcgagactgtatctcaaaaacaaacaaaaaacatatgtaggctattctgtatgggatagatcagtcatacagatgagagatggcagagtattgccaataataacccagggagcctgggatcaaatccccatttcacacctacaagctgtgtgagctcgtgtttcattcataacctctctgtgccaccgttctttcttctacaaaatgtcagccaataaccagtcaactacctaacagttgctggggagaaaaaaaaaaaaacagatatttacatgagaagagcttagaatggagccaggaagtgctgagtatatattagctatatatatatatatatacacacacaaaacagtagttgagaaaaacatgtctgtaattccaattttcaacagcaaactaacaatactttattaagtggtaaacaaataaatattatattcatataacaatatgaaagccagagatagctcgtctgagacacagatgaacaaaaaccagagagagggggccaggtgcagtggcccacacctgtaatcccagtgctttgagaggccaaggtgggatgacagctcgaggccaggaatttaagaccagcctgggcaacagagtgagacccccatctctacaaaaaaaaaaatagaagaattatctgggcatggtggtgggtgcctgcagctccagctgcttagggactacttaaagctgaagcaggaagatccttggagcccacaggattgaggttacagtgaactgtcatctcaccaccacactccaggctgggcccagagacagtgaagccctgtctctaaaaaagaagaaagaaaagaaaagacaaacaaacaaacaaacaaaaaaaaaaacagaagagaagggggagtattcagggtgtaaaccaaaattaaaattctaaggccccccgcaaccatctgaatggatcctgtcctctccgccaagggcattccaaagttaacctgaaaaaccagttcgggccataattgcaagggggagtgggacgtgcctcatcatagcctcctgctttttggaattactgatagaagagaactttaagtctgattttttttaaaattacaatctattttctctgaagcctgctatctggaggcttcatctgcacacacactcaatgtaagtaaaacaggatatctgaataagataggtggattgtgtcaatatcaatatgctggttgtggtattggactggaggtttgtaagatgttagttaccattaggagaaactgggtaaagggtgcacaagatctctgcattttcttcccttccttccttccttccttccttccttggtctccacaaccccttatggtaacccagaccttcctttctattgataataactcaaccaattgcccatcagaaactctttgaatccccctatgacttggaagcacaccctggcttccacttgtcctgcctttctggatggaactaatgtacatcttacgtgcattggttgatgccttatgtctccctaaagtgtataaaatcaagttgtgggccaggagcggtggctcacgcctgtaatcccagcactttgggaggctgaggcgggcggatcacctgaggtcaggagctcaacaccagcctggccaacatggcaaaaccccatctctactaaaaaggcaaaagttagctgggcatggtggtgcacgcctgtagtcccaactacttgggaggctgaggcagaagaatcacttgaacctgggaggttgcggttgcagtgagacaagttcgtgccagtgcactcaagcctgggcaatagagcgcgactccgtgtcaaaaaaaaaaaaaaaaagttgtggccggacaaccttgggcacatggttctcaggatctcctgggggctgtgtcacaggccattggtcactcatatttggctcaggataaatctcttcaagtgttttttagagtgtgactcttctcattcattgacaagggaaagaaagatacaaagacagggacagacaaacagaaatgtaatgagaaagcagagaaagatgaaggagacagcatgggaaagccagttgtgaacacccgatggcaggcatttaaatgatttggtagctctgccaagcctgtagcttcaaagaaaaggaaaaagtgtctcggttcattcctagagtacagaagacagatcagacagaggcaaagagagacaaacagatgtccagaaaacagacacaggcagttggctcaggatagagagttggaggccagccgtccctggcataggcccaccgtgggttaaagtcctcacaccccgactgggatcccagagggctggggccagcagtgacgttccgaaatcttgtccaggacggggaccggctgcaaaccctctcagccctgcacataaaagccagcatggtccgtcgaggcactgttgcccaggtggagactgctccggacgccccccaggggacagtggccggcagcacctgctgcagcacgaggcacagagggtgcactgcagggagaagtgagggcagaggccaaggcgaggagggggccggctcccgctctctctccctctgtgtgtgctgcgcctcccctgtgagcctaacccaaggcaggggactggacgcgtgggaccctctctttggcctccctgacgtccctcaggagcagagatgcgaccgagtgtgtgggccgcggtggccgcgggactgtgggtcgtgtgcacggtgggcgcggcgatccgccagcgctgcctgctctcgcactaccgctcgctggagccccggacgctggcggcggtcaaggcgctgaggaaccgctaagtgagtgaccgcccagcccttgcgccccccggtacactggccccgccgggttcccacacacccgtcgctgacccgaggggtcctgcgtcctagcgcccagcaggcgcctcttgtacgtcagagcccacagttcccaccacgagatccccgcagtccccgtcgtcagcgcgaacgcaggctcagggtcagtcacaaaaggagccctgcagggcggactcggctccaggtcgcgggcgcagggctatgccgggggagagcgggatgcaattcaaccctggttcacgccttcggggagctccctggttcagtacacgacaggcacgaccgtacgctgccagtacccatccacgtccaggaatcccagactgtgcagaggttaggggccctggcgagggggcccagtcgtatgcgataagcgccgcttgtcccgcaggcggaagaggcgctgagttggaggtcgcgcaactgctccgtccgccccaggagggatcctccgcggccatcggtgaggcccagaagcggacgggagaggcatggcctgggcgctgccccctctaacgccctctagtccccgcagtcctgcgctcggctccgccacgtggccaggagcatcgcggacgcccaggcagtgctcagcggcctgcaccgcctggagctgcttcccggcgccagccggatcctggagcccctggcagccgcggggagggacgtggcggcctgcgtgagtgacggccgcgccccgccgcccctcgcccccgccagcttctctgcatcctcaggcccatggcgagccccagcgctttgccaatctgtcctgcttagcggaaaaaccgatccagacccaggtcgggtcctctgggtgtcctcaaatccgggctcgggtctgcggctgggagggcctcgggcagatgcagagaggggctccgtccttcgccttttccatttgcctcgcgtcccacctccagctggcacggccaggctcctccaggaaggtccccggggcccagaggaggcgtcacaaaccgcggagagctgtgagtgcagcaggcagtacagggttagcctgcacggaggaccgagtgaggttgacacggacagcactgaggctgggagcggcgggattggagaggtcttctcgggagggaagagcctggcttagccccgctgccctccctccctggctccaggactcccctcggtgtcgcgaagccagcgtgatcttcaacctcctgcgcctgctcacgtgggagctccggctggctgcacactcagggccttgcctctgaccccgccccctccggcagcacggaaacctccacgccattggctgccgaaagaggtccctgtcgcccattgggccggccaggcgaggatctcagccagtgggtgctgaggcacgagaacttcttcgcagccttgggcctgacttggatccactgtctcagatataagaggagcgggtccttctacagggaagagaccacagttctccaggaagccacgatatttcctcggggtgcattgtacgaccctccaacggttgctatggcaggaaaaaacttgagctctggaaaccgtggctgaccccaggcaacagggaccagttcctccttgtgtggttaccaggacacccccaacaccaggtcctaaccccggatttgtagccccacagccagctttgagattctgtgaatccgtgactcttggatccggcatctaagggacaccaatccatgagggatttggtagtgaaaggcccaagggtccttaaccgactgtggttctttggattcccttacgtgtgtttgtatttgtgaagttcctgtgcatttgctattctgtctcccggtttaaatttattgccagttatcaaagagtgttttgatcgcattggttgttttccgtatgatgattgtgaggtgcaccttacagcaaaaaaagaggccgagccagggactcaggtggcctgaggttcagttctgaccctgccagttaattacagtggaattcagggcaaattacttttctgagcctctgtttcctcacctataggatgggttagcatacttgccttgtggaggagtagtgtccgttgagatcacgttttaaactctccaactgaggtcctagtatggtcttaatgagtggattctattaaataatcactcacataaatacacaaacaattgtgttattaattttttctccaaatctgtgcattagcaatctgcgttgctgaatgcacccctccttgccaaggtcacacggctagtgagggtcagaaccaggtttgaaccccagacccttcatctccaagacccatgctcttcaccactgcctgaacttccctaagaaagacggcacccacgtggtgtccttcaagtccttcgtcacacctcagttcttgagcagagcctcatattcctgagtccttccttgcctgggcaattaagaaatattggccttggctgggctcagaggctcatgcctgtaatcccagcactttgggaggacgaggaaggtggatcatgaggtcaggagttcaagactagcctggccagcatggtgaaaccctgtctctactaaaaatacagaaattagctgggcatggtggcacatgcctgtaatccaagctactcaagaggctgaggcaggagaatcacttgaacccaggaggcagaggttgcagtgagctgagatggtgcctctgcactccagcctgggcaacagagcgagactccatctctcttgctcactcactctctctcatgctctctctctctctctctctctctctctctctctatatatatatatatatatatatatacacacacatatatgcctctggccgggcgcggtggctcacgcctataatcccagaactttgggaggccgaagaaggcagatcacgaggtcaggagttcaagaccaacctggccaatatggcaaaaccccgtctctactaaaaatacaaaaattagttgggcgtggtggtgcatgcctatagtcctttctactcgggaggctgaagcagaagaatcccttgaaccaaggaggtggaggttgcagtgagtcgagatcacgctgctgcactccagcctgggctacagagcaagactccatctcaaaaaaaaaagaaaaaagaaagaaagaaagaaatcatggcctctgggcacagtggctcatgcctgcaaccccagcaatttgggaggccaagacagacagatcacttgacgtcaagagttcgagaccagcctggccaattggtgaactgtcatctctactaaaaccataaaaattagctgggaatggtggcacaaatctgtaatctcagctacttgggaggctaaggcaagagaatcgcttgaacccaggaggtggaggttgcagttagtcaagattttgcactgcactccagcctgggtgaccgaacaagaccctgtctcaaaatatatatatatatatatgccaggaggggtggctcaggcctgtaatctcagcactttaataggctgggtgaggaggatggcttgagcccaggagtttgaggctgcagtgagctgtgatcatgccattgcactccagtgacagagtgagaccctgtcttaaacaacaacaaaaccagagcaggtggaatcctcctgggaacataccttcctgtaggttacccctgagtctccatcagtttctctttccctccagctgctcatctggctcactagccctgccctgctctgggctttcccagcctggggctcccctggtggccggtgtcttacctgaggctgtgttttcacttttcctacatcagctgggactgcccttctgtcagggataaaagctgccccatggagctcaggcaggaattacatcccagacagagctcaaaactgacagaaagagtcaaagccaggacacagtctgagatccagaagaggggactgaaaagaacagagactccagacaagacccaaacagaccctgggtgacagcctcagagtgtttcttctgctgacaaagaccagagatcaggaatgaaactaggtgagtcccacatctctgtccgtgctcagctcctgcagcccctgccctcagtgggcagcctctccatcccctcagctccctttctctctgtgacacagacatgactggggactgcacgccagtgctggtgctgatggccgcagtgctgaccgtgactggagcagttcctgtcgccaggctccacggggctctcccggatgcaaggggctgccacatagcccagttcaagtccctgtctccacaggagctgcaggcctttaagagggccaaagatgccttagtgagtctccccctgccctcctgccatggactagcctccacccccactccaagcgtcaccatgctttcccactcccagcttccttcactgggctagcctccaccctccctgcagtgggctatctcatgctcctactgtagggactgactcatgttttcctgtagaagagggtcctctaccatcctcccagcagttaacctcccctatcctgttgtcagccatcctccaatcccaccaggatggtctaacctccacccctcctgctggggctaacctgtgcctttgctgtctaggaagagtcgcttctgctgaaggactgcaggtgccactcccgcctcttccccaggacctgggacctgaggcagctgcaggtgagagggggagtcaggcccacccctgctctcccagccccactcacctggctctgtagtggccccttcaccgtctctttctcccttgtctctctctcttctcctcacacctgctctcccttccctccgctcccacctgaccacactggctgtgccctctcccctgtgcctgtcaccttcacttgttcctctctatcctgctccccaacctgttcccctcacctcccccctcacctgctctttctcacctctcctcaggtgagggagcgccccatggctttggaggctgagctggccctgacgctgaaggttctggaggccaccgctgacactgacccagccctggtggacgtcttggaccagccccttcacaccctgcaccatatcctctcccagttccgggcctgtgtgagtcgttggggcctgggcacccaggtctgtgagctctgagcagcgtccttccccttgccaaggccccggctcacacaccgccctcctctgcccacagatccagcctcagcccacggcagggcccaggacccggggccgcctccaccattggctgtaccggctccaggaggccccaaaaaaggtgagtgacccgggaagagagggactgaggtctggggagccactgggagcccagaacccagacagcccctgacccatcccctcctccctacaggagtcccctggctgcctcgaggcctctgtcaccttcaacctcttccgcctcctcacgcgagacctgaattgtgttgccagtggggacctgtgtgtctgaccctcccaccagtcatgcaacctgagattttatttataaattagccacttgtcttaatttattgccacccagtcgctatttatgtatttgtgtgtgtaaatccaactcacctccaggaaaatgtttatttttctactttttataacccttgttgaaataaacaaaggaaaagacactcatgacgttggactgtgtgtctgttggtgtgtatttcctttgtgttgctgccataacaacgctaaaagtagcatcttccaaagacacacttgatgagctgggagtctgcaggtcagaggctcgctggccctggctggtttctctcctgtgggactcacaggctagaatccaagcattgctgctgggctcttactgggagctctgaagagaaactctttccagggtcagtcacattgttggcagatcactgttccttgctgctgtaggactaaggttcctgccccctcctggctatgggtccatcctgagctgactctgctgaagggttctccactcctctcactaagctaacctctaccctccctgcagtgggctatctcatgctcctactataggggctgattcatgtcctcctgcagtggagggtcctgtaacatcctcccgggagttaacctccactatcctgttgtcagccatcctctaatctcactggagtggtctaacctccaccccttctactgggggctaacctgtgcccttgctctctaggaagagtcgctcctggggatggatggcaggtgccgctcccgcttcttccccaggacctgagatctgaggcataatacataacgtattctatccctcatgacagtggaagacagaataatttcactgccctgaaaattcactgtccttccccattcatgcttatctggctgtctgtggtccctactaataggcccttccaactcagagccaggaacagtgcttcaaacctttctcatgcttggaacctctctgacctctcctgccatgttgctcttgtacttccagctagagaaagtcttccacgtttcagggctcaggtggttagtttggcatccagggtgatctccccattgtcaatccacatgccataatcgcatctgcaaagctcctttgccgagtaacataagatatgcacagggtccagggatgcggtgctgggtgactttggggtggcatcttcggcctcctacagtgtgtgtatgattgtgcttctgattgtgcgtcattgtagttatgggattgtgtgtgtgcctggtctacctgagagtgtatgagggatcatttagaatgcattgtgctataagtaaagtaacagaagctagaaatgccttggtaataagaactttcatcagcatccatggtgagacatctagaacagcaggttcattgagggctgtgctatccactggagtccgcgggccacatgtcactatcgagcacctggaatataggtggtgcaacctcattttttcagtgagtgtaaaacataccccagaatttgaagatttactgtgggaaaaaaataatgtaaaacagctcgattataatttacatattcattagatgttgaaatgatagcactttggatgtattgggtgaaatgaagcatctttaaaattaatttagagcctggatgtgattgctcaagcctgtaatcacagcactttgggtggctgagttgggaggatcacttgagcccagactagcctgggcaacatagcaagatcctgtctctataaaaaattagagaattggctgggtgtggtggcacaagcccataatcccagctactggcggaagctgagatgggaggactgcttgaggtcaggagttcacgaccagcctgagcaacagcaagatcctgtctcttgcgtgatcacatctcactgtagcctcaaactcctgggctcaagtgattctctctcctcggcaccatcctccaccctctccagcccctccccgaactgggattacaggcttgagtcaccgggtccagcccattctctttccaagaagcccctgaattgtataagcaagcatgaggtctcactaaccctggatcggcccccacaaatgagggggacaacttggatcagggacccctgctgagtagagttggctgagctgctggaacaaagagtcccccaaatacagtgatcatgaattacaaaccacagagtgtcattctccaccagctcctcctcccaaggtgagcgctccccctggcaggatggccccactcagtcatccaggggccctagttcctggcagttctgtgctccacagtccccgggacagggctccctcatcatcttcacccaccggacctcacggcagccttgaaaagcctacggacccttctcagaaggaaagaacacgtgcaggacaaaggaatccaactctgattgtaatacagtgatcaaaatattttttcacactgtgacatagcaattcatgtgcttcttcatgaatgcattaagtaaaaaatcacctgtggcagctttaataaccactgtgacttagaagcagagatgagcataaatgatatttcaaggtgcctgctggaagataacgtgataggaaatgcctgtgatttcttttggtaacaaagtcacaagttctgctaacactgttgtggtgtgttgctgcatttgtaatggattcgtgctagatgcaagactggtccccagagatgttcctgattcttggacctgggaatatgttatgttccatggcacgagggactctgcagatgtgagtaagttaagggtttgggatgggggcgttatcctgggttgtccacctggacccaatgtcatcacgaaagtccttctaagaaggaggccggggtcagcatcattagcggaagatgtaaccacagaagcaggatgttggagtgatgtcagcaagggaaccggggtcaagggatgctggacacccccagaggctgagaaaggagagagatctcccctgctgcttccagaaggaacccgctctgctgacgcctgaagcctcacgagtgggatagaaaacaccagtagaagaaccagctggccacctgagaatcttgagaaattacaaatcactggcaattgttggggggagcggctgttgttttgttctttttggggtttcttttgcttttttgaaacaaggtctcacttctgtgtgcagtttgggccaaagtagctccaggacaggtgtacgggacaaagagtgggtcatcagttcaataaatagccagcccagccaggtgtggtggttcaagcctgtaatcccagcactttgggaggccaaggcaggcagatcgcttgaggtcaggagttcaagaccagcctggccaacatggtgaaaccctgtatctactaaaaatacaaaaattagctgggcatggtggcaagagcctgtaatcccagctactcgggaggctgaggcaggagaatcacttgaacctgggaagcagaggttgtagtgagccgagatagtgccactgcactccagcctgggtgatacagagagactccatctaaaataaaataataaaaataaataaataaaacttgtacgaggccggggcagtggctcacgcctgtaatctcagctatttccaaggctgaggtgggaggatcacttgaacccaggagttctagaccagcctgggcaacatagtgagactctgtctctaccaaaaacaaaaattagccaggggtggtggtgcacgcctatagtcccagctgctcaagaggccgaggcaagaggatcacttgagtccaggagtttcaggccacagtgagctatgatcctgcctctgactccagcctgagcaacagaatgaaatcctgactctaaaacaaacaaaatactaatgtatgctacaacataggtgaaccttgaaaactctgtgcttgacctctgatttgggggaagaaaaaaagagcaagaaaggccaggcgtggtgactcacgtctgtaatcccagcactttggaaggccgaagtgggtggatcacctgaggtcaggagttcgagaccagcctagacaacatggtgaaatcccatcttactaaaaatacaaaaattagccagatgtggtgactcatgcctgtaatcccagctactcaggaggctgaggcaggagaatcactggaacccaggtggcggaggctgcagtgaactgagattgcaccagtgcactccagtctgggtgacagggcaagactccatctcaaaaaaaaaaaaaaaaaaaagcaatgaaataagtaaataaataaaagaaaaagaaaacactatcctgagtgaaagaagccaggcacaaaagaccacacattatatgattcaatttatatgaactattcagaataggtaaatttgtagaagaaattcacagaaagctggccaggcacagtggttcacacctataatcccagcactttgggaggccgagaccgtcagatcatttgaggccagaagttcaagaccagcctagccaacatggcgaaaccccatctctactaaaaatacaaaaactagctggacgtggtggcaggtgcctgtaatcccaaatgctcgggaggctgaggcaggagaatctcttgaacctgggaggcggaggctgcagtgagccaagatcacgccactaaactccagcctgggcaacagagcaaggctccatctcaaataataataataatataaagaaaatgttcagctgaattaaatttaaagaagttcagttgagtaatgaatcatttgtgaatcgagcagcccccagagtcacagaagattcagactccagcacggtctcgtgatcagaacaaattcatagacagaaaaagcgaagtgacgtatggaagttggaagttttgtacagaaacagctggataggctgcaggctggcgtttgccttatttgaaaacagttcgaacacttagcaatctatgagtggttgaagtatggccgctgggattggccaaccctcagctattgttatgggcacatactcctaaattaggttttcaatcttgtctgcctattaagctaggttacagttcatccacaaggactcaaatatagaagtacagagtctccttctcaggccatatttagtttgctttaacagcttcataatctgcctctctgccctcgccgatcatctgtgaacttcccaatgcccttgactgctcaaattagccagtgtggactctatgctaagagccctgacctatgcagccaggaatgggctcttaattcatgaaacagcagtgcaggttaagcacagtggctcacgcctgcagtcccagcactttgggaggccacggcaggaggatcacttgagcccaggagtttgagagcagcctgggcaacatactgagacctcatttctacaaaaaatataaataaaacttttttaaaaaatagccaggcatggtggcacccacctgtcatcctagctactcaggaggctgaagcgtggaggctcgcttgagcccaggagataaggctgcagtgagccatgatcatgccactacactccagccttggcaacagaacaagaccctgtctcagaaaaagaaagaaaggaacagcaatgaggccagtgtgatggagctgcgagggggagggtccagacctccaagagctttgtaagggaaggcaggggttggatatttttttctaagcagaatgggagccacaagatggttttgaatagagcggggatgtaatctctgactgtaggtgggaaagagggtgtgggagtgaggggtgaccaggaggaagctgctgtgatcatccaggcaggaggtgacagtagacaggtagatgagatgtatggggagggtgagaagtgcgtgaatttggaaacgctttgaaaatacagccagtggaacttactgatgaattgaaaatgatgtggtattgtgtatgtgtgtgtgcacatgtgcatgcaggcgtgagagagagagaaggatggcctgatggttacaatgaagcctcaatttcatcagtggaaaaggagaacaatactcactgccgaggcttgttgtggggaatctatataattgtgggtgtaaagcacttagcacatttcatgaaatatagtcactgtcatcattattcattacgagatgtgttctaaggtaagcaggtctgtgcaaacctacccccaaaggccaagggagaaagagcctgacaaatccagtttctttttttttcttcttcttcttcttttttgagacagaatctcctgttgcccaggctggagtgcagaggtgcgatctcagctcactctgcctcctgggttcaagcaattctcctgcctcagcctcccgagtagctaggattacaggcgcccaccatgacgcccggctaatttttgtatttttagtagagatagggttttaccatgttggccaatctggtctcaaactcctgatctcaggttatccgcccaccttggcttccctgagtgccaggattagaggcgtcagccaccacgcccggccgacaaatccaatttcttagaaggaaacgtttaagaggaattcacaaaccgaagccatgtctcaggaggccctaggaagacagaggggatcccccacacagttatcccacaaatgtagggcttatacactataggaaatttgcctcaaggcaggatttatggtaagtatgtgtttatgataacataaaggttattttgacctaagggcaggatttttggtaagtacatgaaaatagaaatcttagaggcattcccagaactggagttaatcagaagtcaacatgggcctgaatctcagcactttgagaggccgagaatggaggatcgcttgaccccacaagtacaagaccagtctgggcaacatagtgagaccccgtctctacaaaaaaatttaaaaattagctgggtgtggtggtgaaggcctgtagtcccagctactcaggaggctgaggtgggaggattgctggaccctgggaggtcaagatgcagtgagccatgatcgtgccactgcactgcaacctgggcaacagagcaagactctgtcgcaaaacaaacaaataaaaaagaagtcaagatggcagattagcatccaagatggagttactttaatctcccctgggtgtgtttgtcattgttgttgttgtttaagacacagtcttgctctgttgtccaggctggagtgcagtggcatgatctcagctcactgcaacctccacctcctgggttcaagcaatctcctacctcagcctcccgagtagctgggattacaggcacgtgccaccatgcccagttaatgtttgtatttttggtaaagacagggtttcaccacgttggccaggctggtctcgaactcctgggctcaaatgatccacctgcctcggcctctcaaagtgctaggattgcagcacccagcccactgggtgtgtttgagacaagtcaaccaaacccatcgtgtttcttctggcagctcccgcaaaactgtacatgtgccccctaagattccaagaaagacctccaccatgccccaattgcttcaaaaacatctgcccccaactcgtttgtgctttcaccactgctaggaaataggggtgactcagggcgatttcctctcctttcaccactctatgggttctgagggttttccgtcagggatctctttctagaagaattccaagctctctgctctagcctcctttctgtttctctttcgaattcagtctgtcctctgtcatctcctgaccactgcgtatctgagcttccccagccctgccctggcggcacattccaatttcaggaggtgtgtttgcttttctttcttcagctgggattagccaatccagtggttcatggcccttgcttgcttcataatcacctagggaactcaaaagatgtctggcctgcaatcccagagatgtgattggttttaatcattacattctatcagtgattcctaaactttaaagcgcatcggaatcagctagagtcttgctaaaccgtagaaccaacctcattggcaccaccttggcagagtgttagaaatactgaatctcaggccctagcccagacccactaaatcagaaatgtgcaggttaggctggcacagtggctcacacctgtaatcccagaactttgggaggtggggtcagggagattgcttaagcccaggagtttgagaccaacctgggcaacacggtaaagccccatctcaataaataaataaataaaccatgtgtggtcgagtgcacctgtgatcctagttacttgggaggctgaggcaggaggatcacctgagcccagggaggtctagtctgcagcaagcagtgattgtgctactgcactccaccctgggtgacatagtgaaaaccagtctcaaaaaaaaaaaaaaaaaaaaaacagaaaaaagaaaagaagtgtgcactttaacaatatttccaggtaactctacacatgtgaaagttgaagaagcactgggctcaacccctgactgctgtgcagctgggggtagaccaggtggagtgggcctgccagcttgccttgcagaacctcagatcccacagccagatcccaaccccactgtaacctccatttcctacacagccttctctgaacgctcctcccacctctgcctatggagcatcataataataataaataatattttaataacaaaatggcaaaagtttatttggtgcatctcctatgcaaggaattaaatgaattaagttaattcatttaatccttactaccaccttaggatgtaggtcttacaattagtcccactttacagatgaggacccagagcatcaagatgcatccggccaggcgcggtggctcacgcctgtaatcccagcactttgggaggccatggcgggcagatcacaagatcaggagtttgagaccagcctggccaatatggtgaaaccccgtctctactaaaaatacaaaaattagccaggcatggtggtgtgcatctgtagtcccagctactcggaagactgaggcagaagaattgcttaaacctgggaggtggaggttgcagtgagccgagatggtgccactgcactccagcctgggtgacagagtgaggctctatctcaaaaaaaaaaaaaaaaaaaagaagaagaagatgcatccagccgggctcggtggctcacaggcaacatagccagaccctgtctctacaaaggtaataatactaataataataatcataggcaggcacacctgtagtcccaactacttgagtggctgaggcaggagaatcacttgagcccaggaaatggaggctgcagtgagctgtcatcacaccactgcactccagcctgtgcaatagagcaagaccctatctcagaaaaataaataaaatattatagacttacaagaagttgcaaaaataccacagaagcgtttcccatatccctcacccagcttttcctaatagtaacatcttgcataactatagtaattctcaaaactaggaacctgacattgtcacaatactattcactcaactacagactttaccgggatttcaccagtttttgcatgcactcatttctttctgcatgtctttgtgtataattcagtgacagtttatcacaggtataaatcccataatcaaaatacagaattgcttccttactacaaagaaatgtacaagtcacacctttacagtcacatcctccctctccttctcttacccttgacaaccactaatctgttctccagctttgtaattttgtcatttcaaggatgttatataaatggaatcacatagcatgtcacttttttttttttttttgagacagagtcttgctctgttgcccaggctggagtgccgtggtgcaatctcggctcactgcaacctccacctcctgggttcaagcgattctcctccctcagcctctcgagtagctggggttacaggcacgtgccaccacacccggctaattttttgtatttttagaagagatggggtttcaccatgttggccaggctggtctcgaactactgacctcgtgatctgcctgcctaggcctcccaaagtgttgggattacaggtgtgagccaccacgcccggccagaatgtcactttttgagaccgacttttttccccactcagtaaaacatgcttaaaatccatccaggttgtgtgtatcaatagttgaatcctattaattgctgaaagtaattgtggtttttgcattgttgaaatttgtcatttgatattggaatacattcttaaataaatgtggttatgttatacatcattttaatgtccatttcttgctttatgtttttttgctcatgacattacttgctgttgattttatgtttactttagactatggaaattatattaggcagaaagcaaattcaggcaattttcttatttgggttcaaaacgggttgttaagcagcggagacaaatcgcaatatcaacaacacatttggcacgggaactgctaatgaacgtacagtgcagtggtggttcaagaacttttgaaaaggagaagttttgccttgaagatgaggagcatagtggccgccgtaggaaattgacaacaaccaactgagaacagtcatcgaagctgattctcttacaactacacaagaagttgccgaagaactcaacgtcgaccatggaccattctatggttgttcggcatttgaagcaaatcggaaaggtgaaaaagctccataatggccaggcgcagtggctcacacctgtaatcccagaactttgggaggccgaggcaggcggatcacctgaggtcaggagtccgagaccagcctagccaacacggcaaaaccctgtctctactaaaaatacaaaaattagctgggtgtggtggtgggtgcctgtaatcccagctactcaggaggccgaggcaggagaattgcttgaacctaggaggcgtaggttgcagtgaaccgagatcgcgccgctgcactccagcctgggagacagggcaagactctgtcacaaaaagaaaaaaaaaaaaaaactcggtaagtaggtgtctcatgagctgagcgaaaattttaaaaatcgtcattttgaagtgtcatctcttattctatgcaacagcaacgaaccatttcttaatcagattgtgacgtgaaatgaaaagtggattttatacaacaaccggcaacgacccgctcagtggctggactgagaagaagttccaaagcccttcccaaagccaaacttgcaccaaagaaaggtcatggtcactgtttggtggtctgctgcccgtctgatccactacagcgttcggaatcctgacgaaaccattacatctgagaagtagcctcagcaaatccatgaaatgcaccaaaaactgcaatgcctgaagctggcatcggtcaacagaacggacccagttctccacgacaacgcctgactgcatgtcacacaaccaatgcttcaaaagttgaatgattgggctatgaagttttgcctcatccaccacattcacttgacctctcgccaaccaactaccacttcttcaagcatctcgacaactttttgcagaaaaaaatgcttccacaatcagtaggatgcagaaaatgtttcccaagaactcgtcgaatcccaaagcacaatttttacggtacaggaataaacaaacttatttctcattggcaaaaatgtgttgattgtaatgtatcatattctgacttataataaagatgggtttgagcctagttataatagtttttaaaattcactgtccaaaactgcaattacttttgtaccaacctaataatattctcttgcatggacgtgccacactaaccattcacctgttggaggacatatgagttgtttccagtttgggactatcacaaataaagctgctatgaatatttgtatcagctttttgtttggacatacatattgatgtctctaggataaatgagcaggagtgtggttgctgagtcatgtggtaagcacacacttaaatttttaagaaagtgccactgttttccagaatggctgtatcattttacattttcaccagtggtgtgtggaagactgggtttcttcacgtcctcagcagcatttggtcctattggtattactgttactcattctaataggggtgtactggtatctcatcttggttttaattcacatttctctaatggctagtgatattgacatattttcatgtgtttgtttactatctgtgtatcctctttgactgtctgttcatgtcttttgcccatttctattggattttttcttgtttttatggatgagttttgagaataatatatatttttttctagctactattccttgttgaatacatgatttgtaaatattgtcttccagccagtgtcttgttttctcatcctttaacagggccttttgcagaacaaaagttattaattttaataaagtccaattgatcctttttttgttttagagacaggatcttgataaagcaatcctaccacctcaagtttccaagtagctaggactacaggcatgtgccaccatgcccagctaatttttttatttttgtagaaacagtctcactggctgggcatggtggctcacgcctgtaatcccagaactttgggaggcagaggcaggtagatcatgaggtcagaagatcaagaccatcctggccaacatggtgaaaccccgtctctaataaaacacaaaaaattagctgggtgtggtggcacacgcctgtagttccagctactcggaaagctgaggcaggggacttgcctgaacctgggaggcagaggttgcggtgagccaagattgtaccactgcactccagcctgatgacagagtgagactccatctcaaaaaaaagaaacagtctcactatgttgcccatgctcgtcttgaactcctggactcaagcaatcctcccaccttgtccttccaaagcgctgggattacaggcatgagctgcctcacctagcccctttttgttttttaaagaatcatgctggttgggagcggtggttcatgcctgtaattccagcaatttgggaggctgaggtgggcagatcacctgactcaggagtttgagaccagcctggccaacatgatgaaaccctgcctctgctaaaaatacaaaaattagctgggtgtggtggtatgtggctgtaatcccagctgctcagaaggctgaggcacaagagaatcgcttgaacccgggaggttgcagtgagccgagatggcgccactgcactctagcctgggtgacagagtgaaactccatctcaaaaaaacaaaacaaaaacaaaacaaaaaaaaaaatcatgcttttggtatcaagtctaggaactctttgcctaaccctaagttataaagattttcttctatgttctgtttttaaagtttacagttttacattttacattaagatctatgatatatcctgagttaattttcttttttctttcttttttattttttttgagcagattgtcactctgttgcccaggttggaatgaagtggcgtgatcttggctcactgcaacctcggcctcccagattcaagtgattctcgtgcttcagcctcccaagtaactgggactatagacctctgccaccatgccaggataatttttgtgtttttattacagatggggttttaccatgtttgccaggctggtctcaaactcctgacctcaggtgatccacctgccttggcctcccaaagtactgggattacaggcatgagccactatgccaggtcctgagttaatttttatataaggggtgaggtttaggctgacattcgtacttttcactcttgatgtctcattgcccatttgttgaaaagactatcttttctatattgagttcttttgtaccttgatcaaaattcatttgggtatacttatgtggttctgtttctgggttctcttctgtttcattgacctatgtgtctgtgcttccactaatatcatactgtcttgattatcatggtcatataataatctcaaaaccagcaagtgtgactcctcctaccttcttccttttaaatattgtttcagctattctagttcctttgcctttctatatacattttaagataagcttgtctatacagaccaaaaaaaacttggaatttttatgggaactgcattgaattatagattactttgaagagaattgacatctttactatgttgagcattccaatccatgaacatggtatatctgtcccttaatttagataggttttgatgtctttcatccgggttttacagttttcagcatacaaatcctattcatgttttgttggatttatacctaagtatttttcagtaattgtaagtggaattgtatttttaattttagtttccaaatatttattgctggtataaataaatataattgattttctgtgttcatgttgtatcttgtggctttgatcaactcacttattagttctaggagttcttgtagtttcctggggctttatacataatcatgccatctacaaataaggagagttttatttcttcccttccaatctctgtgtattttattttatttttgccttattgcactgcctaggacttctgacactatgttaaataagagtgatgagacatcacacccattaggatggctacaacaaaaacagaaaataacaaatgctgacaaggacatggagaaattggaacccttgtacactgttggtgagatgtaaaatgatacagccattatggaaaacagtatggcagttccccaaaaaattaaaaataggattaccatatgatccagcaattccacttctgtgtatatacccaaaagaattgaaagcagggactcaaagaggtatttgtacacccatgttcatagcagcattatttgcaataactaaaaggtgaaaacattccaagtgtctattgactgataaatgaataagacaaatgtgatatatacatgcaacagaacattattcagccttaaaaaaagaaagaaagaattctgacccatgctacaatatgaatgaaccttaaggccgttatgctaagtgaaataagccagtcacaaaaggacaaatatatgattctgcctatatgaggcatatagagtagtcaaattcatagaaacagtaatatagcagttaccaggggcttggaggagaggggaatgggagttattgtttgataagtaaagacttccagttttgcaagatgaaaagagttctggagatagatggtactgatggtagcacaacaatgtaatgtatttaatgccactgaattgtatacttaaaaatggttatgataggccaggcacagtggctaatgcctgtaatcccagcactttgggaggccaaggtgggcaaatcatctgaggtcaggagttcaaaaccagcttgagcaatatgatgaaaccccgtctctactaaaaatacaaaaatttgccaggcatggtggcacgcacctgtaatcccagctactcaggaggctgagacaggagaatcgcttgaacccagaaggcagaggttgcagtgagctgagatcgcgccattgcactccagcctgggcaacaagagcaaaactctgtctcaaaaaaaaaatggttacgatagtaaattttatattatgtgtatttcatcccaatgaaaataatgaaataatgaggggtgagaatgagtatccttgccatgcttgtgatttttaggaggaaaagcaacaagtatttcaccattttgaggctagctgaaggtttttcataaattttgttatcaggctgagaaagtttccttcaatttctagttttctgaaagttttttatatcaggaatggatgttagattttgtcagatgctttttatgcatgatttttcttttttagcctgttaatatgatgaatcccattgagaaattgcaaaatatttggctaaccttgcattcctggaataaatcccacatagtcatgaagtataatttttctttaatgtgaaacatctttatttactttggaccaccactcttccagtgagattaacttttccacctttaactgcagtaaaagatatattaagttggtgcaaaagtaattgcagtttttgccattatttttaacgacaaaaaccacaattacttttgcatcaacctaatataacgtaaaatttgccattttaaccacgtttaagtgtacaatttagtggtattaattacattcacaatggtgtgcagccatcaccactatgtgttttcaaatttttttcaacaccccaaacagaaaacctgtatgcataaagcaaataacatcccttcctcactcagccctaagtaatttctaatttcctttctgcctctatgaatttccctattctcgatatttcccataagtagaatcataaaatatttgtcttttttgtgtctggcttacttcacttagccataatggtttcaaggataatcgatatagcagcatgtattagaatttcattcttttttatacatgaataatatttcattgcatgtacatatcatattttgtttattcactcatctgttcatgaacacatgggttgtttccatctttgtgaataacagtgttgtgaatataggtctataagtgtctgcatgagtccttgttcagttcttttttttgacatggagtctcactctgttgctgaggctggagtgcagtggcgcaatcttgattcactgcaacttctgcctcccaggttcaagccattctcctgcctcagcctgccgagtagctgggattacaggcatgcaccaccacgccctgctaatttttgtatttttagtagagatggggtttctccgtgttggccagcctggtctcgaacttctgacctcaaatgatctgcccaccttggcctcccgaagtccttgttcaattcatatggcaacatatttatttttacatattttttattgctgtataagatttgctttttttgtatgtacattcataaaaaatattggtctaaactgggcactgtggctcatgcctgtaatcctagcactttaggaggccaaggcgggaggatcgcttgagcccaggtgttcaagagtagcctgggcaacatggcgaaattttgtctctacaaaaaaatccagaaattagccaggcatggtggtgggcacctgtagtcccagctacccaggaggctgaggtgggaggatcacctgagcccaggaggttgaggctgcagcaagctgtgatcatgccactgcacccagcctgggtaaaagagtgaaaccttgtctcaaaaaaaaaaaaaaagataagaaaagaaaaggaaaatactggtctatagcttctctttttctttatttgttttcattctgcctttgtctggttttggaatcaggataatgctgactttataaaatgaaatgaaaagtattgcttcctcttctgttttctggaagcgatactaaagaattggtatcaattcttctttaaatgtttgctagatttctacagtgaaaacatctggacacaaagatttccttcttgggagccttttaattagagatcaagttttttaaatagttataagactactcataatatctatttcatcttaggtgagctttggccaagcgatcctcccgccttggcctcctaaagtgctaggattacagcactttgcggtctttgagcaatttgtccatattgtctaagttgagtttatatgcatagactcattcacagtattcccttattattcttttaacgtccatgaggtctgtagtgatagtggtcatttgtgtcttctctcttttctcttcttctgtcttgctaaaagtttatcaattttattcatcttttcaaagaaccagcttttgattttattgtctttattgcttttctgttttctatgtaattgatttctccacctctttatgatttctttccttctgcttgatttgagtttacttagctttttctagtttcttgagggaatgccttgtttagtaatttgagacttttccttcatttttttgtttttttgagacagagtctcgctctgtcatccaggctagagtgcagtggtgccatctcggctcactgcaacctctgccttccaggttcaagcgatttttgtgcctcagcctcccaagtagctggggttacaagtgtgcaccaccacacctggctaatttttgtatttttagtagagacaaggtttcaccatgttggccaggctggtcttgaacttccatcaaatgattcacccacctcagcctcccaaagtgctgggattacaggcttgagccaccacatctggccatttcttcatttttaatataagcattaagtgctataaacttctctctaagactgctttagttgtatcccacaagttttgggggaggtttcttcctgttttttttttttgagacagggtctcattgtgtcacccaggctggagtgcagtggtgctatcactgctcactgcagcctcaacctcctgggctcaagtgatcctccctcctcagcctcccaagtagctggaactacaggtgcacaccaccacacccagctaatttttaaattttttgtaggaccgtgtctccctatgttgcccaggctggtcttgaactcctgggctcaaatgatcctcctacttcagcctcccaaattgttgagattacaggcatgagccactatgtccaaccacgagtttttatatgttgtatttttgtcctcattcattttggctattttttttttttttttttttgagatgaagtctcactctatcgcccaggctggagtgcagtggcacaatcttgactcactgcaaccttcacttcccaggttcgagcaattctccctgcctctggctcccaagtagctgggattacagattcctgccaccacacctggctaattttttgtacttttagtagagacagggtttcgccatgttggccagggtggtctggaacccctgacctcaggtgatcagccctcctcagtctcccaaagtgctgcgattacaggcatgagccaccctgcccagcctaacttttgtatttttgatagaggtgaggtttcaccatgttagccaggctggtctcaaactcctgacctcaagtgagccacccacctcagcctcccaaatgctgagattaaagtgtgagccatcacgcctggcctccatccatttacttttaacctacctatgtcattatatttgaaatgagtttcctgtagacagcatacagttttttaaaatatattctgccaatctctgtatataaaccatttgcatttaatgtaattacagatatattagaacttaagtctcccatcttatttttcttctgttccttctgttttttattcttgtttccttttcattgccctcctgtggattactaagcttttttttagtgtttcatttagctttatctatagtttttttttttttagtatatctctttatatagttttttagtggttgctctggaattacagtatatatataacatcacaatgcaatagtattaatattttatctcttcaaatggaatgtaggaaacatcacaatttaggtccctttatcctccctgatttataaatatataggtatctttattttgtggtgggggaacaaagtctcgctccatcaccccatttggagtgcagtcacagctcaccgcagcctcatctccctgtctcaggtggtcctcccacctcagcctcccaagcagctgggaccatgggaccacaagcacctgccaccacgcctggctaatttttgtatttttggtagagatagggtttcgccatgttgcctaggctggtctcaaattcctgagcttaaacaatacacccaccttggctcccccaagtgctgaaatcataggcatgagccaccatgcccgtccccactttctttctgttcatccagaacatcagtgatgtgagtgttaaaacttaatgtactaaaggtccctggagctcttttcttttctctttttttagagacagggtctcacattgtcccccaggctggagtgcagtggtgcgatattggcttgctttaacctccacctccctggagttcttttcatttttaaaaatctactttctatcctttgttcatacttcaatctatttgctacttactctctgttgttcagaatgagtaatttctattgacctatcttcaagttttctgattctttcttctgccatctccattctgctatttggccctttcagtgagttttacttcagttcttgtatttttcagttcttatatttctctgttctaaaatttccactcaattctttataccttctatttctttgatgaaactttctattaaaaatttttgtgtcagccaggtgcagaggctcactcctgtaatcccagcactttgggaggctgaagtgagtggatcacgaggtcaggagatcgagaccatcttggctaacacggtgaaaccccgtctctactactaaaaatacaaaaaattagccaggcgtggtggcaggtgcctgtagtcccagctactcaggaggctgaggcaggagaatggcatgaacacgggaggtggagcttgcagccactgcactccagcctgggcgacagagcaagactctgtctcaaaaaaaaaaaaaaattgtgtcaaaagtattcatgattgtttgttgaagcatttttatgacaattactttaaaattattgtcagagagccaggcatggtggcttacacctgtaatcccagctactcggaaagccaaagagggacgattatttgaggccaggagtttgaggccagcctgagcaacaaagtgagatttcacccatatcttaaaaagcaaataaataaaaattttttaaatatttttgtccaataatttcaatatttgtatcattttagtgttggcatctattgattggcttttcccattccacttgagattttcctagttcttgagatgatgagtataacaagttattttctcttgtatcctggacttttgagacattacattatgaaatgctggtttcttttttaatcttgtcattgctgaggcaataatcagagctctgttcacacatttctggtgctagtcaccttacacagtgaacaaatcacaagttttgggtaatttgttacatagtaattgtaacgagacacacacacacacacacacacacacaaacaagcctatttgtacataaaagaagaaattgtctacgtgtgcaggtataattcttttgctccttgggccccaggacagcagtagagtaaaaatggctgtgtggggtccttggtggggtgggaattagaggtgatagggcccccaccatagtttaggtgacctgaaagctgggctgtatatctgttttagtgcatttgtgttgctataaaggaatacctgaggctgggcaatttataatgaaaagaggcttatttggctcacagttccgcaggttgtacaagacgcatggcactggcatctgttcctggtgagggcatcgggctgcttccactcaggatggaaggcaaaggggagctgcatgtgtggagaccatgtggcaagagaggaagcaagagagatgagaggtgccaggctctttttaacaagcagctcttgagaaacctaacagagtgaggactcacacattacctcaaggatggcaccaaaccattcacaatggatctgcccccaggacccaaacacctccgactaagctccacctcccaacattgccatactggggattaaactttttttttttttttttttgaaacagagtctcactctgtcacccaggctgagtgcatgatctcagctcactgcaacctccacttcccgggttcaagcgattctcgtgcctcagcctcccgagtagcgccaccacacctggctaattttttgtatttttagtagagacagggtttcaccctgttggccaggctggtcttggactcctgacctcagatgatctgcctgcctcggcctcccaaactgctgggattacaggtgtgagccaccacgcccagcccttatttttttttttttttaatttgtagagatgaggtcttgctatgttgcccaggctgggctcaaactcctgggctcaagcaatcctcccttctcagcctctcaaagtgctgggattataggcatgaataatcgtgccaggccaaagacaagttttaacagtcagctctctggccacaaattatttatattccttccacatgcaaaatagactcatgtctttcctcaacctcaaaaatctcatctactatggcaggctcagatgcaagccccaggatctcatcatctaaatcagatccaagtgttggggaggctacagtattgccagcatatagaccctcgagcacttctggagagagggatacaggtgcaactatttgggagagcaaaggatgaatatgtagagctgtgctgcccatcatgatagccactagccacatacagtaattaaatttaaataaaatgaaataaattgaaaattcagttcctgcattgcacttgccaaattttaaatacctaacagccacattggaccgtaaagatgcacaatatttctgtcattgcagaaagttctaatgaacagcactgattagaccatataagcacaggtatgccctgtgacccagcaatcttcagttcaggttctcccaaaagcatatcctgaagccaaagatgcaggtggcttatttgggagctgtttcccagaagcacaagcgagtggggaaactgagccaggaagagcaaaaagccaataaatggtgcagagtctggagtagagggaggcacctagagcacttccctgactcagagtgagcacctccttaatttttgtttgtttgtttgtttgttgagacagagtctcactctgtcacccaggctggagtgctgtggcacaatctcggctcactgcagcctccgcctcccaggctcaagcgattcctgtgactcagcctcctgagtagctgggtttacaggcacatgccaccacacccagctaatttttgtatttttagtagagacagggtttcaccatgttggccaggctggtctcgaactcctgggctcaggtgatctgcccacctcggcctcccaaaatgctgggattacaggtgtgagccaccacgcctggccccctgcttaaattttgactctggtcccctaatttgacccaccctaattccagcccccaaaaaggctactgctgtgagcagctagaagtcatttgttctggggacagtcagaagatcaaggagtcatgtagaagtcgcccgagaattgaccctccaagggaaagggaagctgcagtatttattccattgctttcagccctcactgtttgaggactgctactgggggaatcaatcctgctacttccagtccattctgcatgtgggcagtagaaaggccttggtctccagcagagaagcagaaagatccaagcacgtgaggcaggaaactgtcagcctgtgtgggaactgaccaccatatccacaagccgaggggatacagtagagggcatcagctggtgtgctaccgtatattccagaaagccgcccacccagaggacaggtgtgagccttatggtaatggggagctagaggcaacctaagtgtccatcactgggggaataggtaagtaaaagtgctgtggttgtatacaccatgaaatacagtgcacaggaaacttgatgtacacagcttgtgaagagatctcagaagcagtgttaagttaaaaaataaaaaagaaagaagtagaagatttatagcacaattccacttatgtaaattggaaacacatacacacacgagatcacaaattataaagatacatctttgcagctatttatcaagtgcattatagtgggtgtctgtgggggtgcgatgggaatgggaattggcaatggaggaataaaagccttggagggtctttcatgggccaattgtgatcctgtgttatgatctgaagagtatgattaataactttctgcaccaaagggctaagaaaaaaaataaaggagtgaaaataggaaatgtctgcacatcagagcagtttcttacctgctacacaattactattactgcagggatgatgatagcaaggcaaccagactcaccgcctgccttctctccaggcagcccctccagtccccaggaaatgcgcttgcccccagcgaataaggagttccctacccctctcatgctacccagagggacagaaaggagaagtgggcctgctacccccagaggttctcatcttctacctgggctgcatatggaatagggagcaagtacataggactcatcataccccatttctgcctctatcccactgtgggaccttaggcaagtcactttgccttcctatgcctcagttatctcactagtaaaatgggcatgattattgtattagtcagggttctccagagagacagaacaaataggatgtttggataaatagatgatagatagagagatatagactagatagatgagagagatagactagatagagagagagagagagagagagagagagagagactagatagatgagagagagataggaggggatttattaggggaattggctcagacaattagggaggctaagaagttccacaacaggccatctgcaagctggagaaccagggaagcttgtagtgcagctcagttccagaataaaagcctcaggacttagggggtagctagtgcaagtcccagcattttttttttttctgagatggagtctcactctgttgaccaggctggagtgcagtgacatgatctcagctcactgcagcctccgcctccagggttcaagcgatactcctgcctcagcctcccaagtagctgggactacaggcctgtgccaccacgcctggctgatttttatatttttagtagagatggggtttcaccatgttggccaggctggtctcgaactcctgacctcaagtgattcacctgcctcagcctcccaaactgctgggattacaggcgtgagccaccatgcccagctgcacatcccagcattcaaagaccaaagagcctggagttctgatgtttaagggcaggtgcagggtgtcccagctcataagagagagcaaattctcctttcctctgcctttttgttctattcaggccctcggccaattggatggtgcccaccacattgggtaacaacgggtcttccttactcagtccattgattcaaatgccaatctcttctggaaacaccccagagtcatacccagaattaacgcatcaccagctatctgataaacttaaccagtcaaggtgacacctaaaattaaccatcacaattataaaaataactactcagagaaacattaggagcatgaactgaaattagttaatgggacattcttaaaccaatggcagaagctccttcttggccaggagcagtggctcatgcctttaatactagcactttgcgaggctgaagcaggaggatggcttaaggccaggagttcaagactggcctgggcaacatagtgagacccctatctctacaaaaataaataaataaataataaagtaaggtggtggctcacgcctgtaatcccagcactttgggaggccaaggcaggcagatcatctgaagtcaggagttcgaagccagcgtgaccaacatagtaaaacccagtctctactaaaaatacaaaaactagccaggcgtgatggcatgcacctgtaatcccaactacttaggaggctgaggcaggagaatcgcttcaactcgggaggcagaagttgcagtgagccaagattgcaccattgcactccagcctgggcaacaagagcaaaactacgtctcaaaaaataataataacaataaaataaaaaacaagcttttttttttttgaaacaggatctcactccatcacccaggctggagtgcagtggcacgatcttggctcactgcaacctccgcctcccgggttcaagtgattctcatgcctcggcctcctgagtagctgagaccacaggcgcatgccaccacacctggctaatttagaataaaaaagaagcttcctctctgccactcaggtagccttatccctaatctcagcctccgtcagggactccctgaggccagttggctgaaagctgcccagggagttctaaggatttcagtttctctttccttcttgatgcagctcccagctcacttggccctgcccacacctgttccctcatcaggctcccagacgggccccgcccactcatgcctcttaagtcaaagtggaaattctcatttccaattaccttttcactttacacacatcatcttggattgcccattttgcgtggctaaaaagcagagccatgccgctggggaagcagttgcgatttagccatggctgcagcttggaccgtggtgctggtgactttggtgctaggcttggccgtggcaggccctgtccccacttccaagcccaccacaactgggaagggctgccacattggcaggttcaaatctctgtcaccacaggagctagcgagcttcaagaaggccagggacgccttggtgagttcctgttgctgtggatgaaccacttctacgggtgtcccaattactgcccttctactgtgggctagcctctagccttccaactatggcaaacctctatcctttctgcactgggttaaacccatgctgtcaggccaacttcatccttgctgctatgagctagcttccagccatcctgctgtgggctaacccctgcccttgctctctaggaagagtcactcaagctgaaaaactggagttgcagctctcctgtcttccccgggaattgggacctgaggcttctccaggtgagctgaaagtcaggcccccttcacccttcccttgaccctctcccccctcttcttaagtggccccttagccttctttgtttcccttgtccttcactctcttggacctctcctcacctgtcctgtgcccctgccacttcaaaactgctctcttgactctgtccttcccctgggtcccttttatcatctcccatcggccccacttccctagctcgctcacctgtccctgtcacttccactctcactcttcatttctctcccaaatgtctccagtctgtcgcccacctgtgcctttcgtcctgctccacttctccctgtctgttcccaacactgaccccctctccctctcacctgcctctgtcacctgtccctcattatctctcactgacattcatccagctcatgctcccccctcatccacccttctcttttttttttttttttttttttttttgagacagagtcttgctctatggcccaggctggagtgcagtggcatgatctcggttcactgcaacctctgcctcccgggttcaagcaattatcctgcctcagcctcccgagtagctgggattacaggcatgtgccatgatgcccagctaatttttgtatttttagcagagacggggtttcactatgttggccaggcttggtctcgaaatcctgacctcaggtgatccacccgcctcggcctcccaaagtgctgggattacaggcgtgagccaccacacccagccctacccttcttctctgtgcatgcaactgtccctctcttactgtgcccccaacctgctttctcctcacccgtccccaccccgccccagagaacttctgtgacccccgtaagtcccctttcatttgtctccatttcacttatcccctcacctgcctccttgaccatcctgcctcacctgtatccttcctcatgtcttccccctcctgtctccttctccccagacccctcacctgtccccaccacatgcactgtgtcaccgaccttccccaggactgcctacctgtccccactaactgggtcttcttgcctgttctccctcacctgctctttctcacctctcctcaggtgagggagcgccctgtggccttggaggctgagctggccctgacgctgaaggtcctggaggccgctgctggcccagccctggaggacgtcctagaccagccccttcacaccctgcaccacatcctctcccagctccaggcctgtgtgagtccttggggcccgggcacccaggtctgtgggctctgagcagcatccttcccctgtggtggcccaggctccgcctcacacaccgccctcttctgcccacagatccagcctcagcccacagcagggcccaggccccggggccgcctccaccactggctgcaccggctccaggaggcccccaaaaaggtgagtgacccaggaagagaaggaccagggtctggggagccaataggagcccagaccctggacagcccctgacccatcccctcctcccctacaggagtccgctggctgcctggaggcatctgtcaccttcaacctcttccgcctcctcacgcgagacctcaaatatgtggccgatgggaacctgtgtctgagaacgtcaacccaccctgagtccacctgacaccccacaccttatttatgcgctgagccctactccttccttaatttatttcctctcaccctttatttatgaagctgcagccctgactgagacatagggctgagtttattgttttacttttatacattatgcacaaataaacaacaaggaattggaaccttctgtgataggtgaatccttgagtgtgtgtgtgattgtgggtctgtgactgggtgtggatgtctgggtgatgcaggcaaaatttgtgactcgttgtgtatatttgtgtgtgcctgacttctgtgactatgtatgtatttgtatggaaatgagtgtctgcctgaacttgagtctaaccaaaggtgcgtaactgtgcatgttcatgcccacacgtgtgcaagtatgtgtgtgtactgccaggcatggtggctcacacctgtaatcccagtgctttgggaggctgaggcaggcagatcacttgaggtcaggaatttgagaccagcttagccaacatggtgaaaccctgtctctactaaaagtacaaaaattagccgggagttgtggcatgaccccgtaatcccagctactcgggaggctgaggcaagagaaatgcttgaacccgggaggtggaggttgtggtgagccgagatcacatcactgcactccagcctggccaccaagagagaaactccatcttaaaaaaaaaaaaaaaaaaaaaaaaaaaaaaaaaaaaaaggccagcctccgtgggctcaggcctgtaatcctagcactttgggaggccaaggcgggcagatcacttgaggtcgggagtttgagaccaacctgaccaacatggagaaaccccatctctactaaaaatacaaaaattagccgggtgtggtgatgcatacctgtaatcccagctactcgggaagctgaggcaggagaatcgcttgaacccgggaggtggaggttgtggtgagcggagatcacgccattgcactccagcctgggcaacaagagtgaaactccgtctcgagaaagaaaaaaaaaaaaagaaagaaaagaaaagaaaagcggtcaggatgctacatcctggaacctaaccacaatggtgtgagaagcccagacatacagagagaccacatataggtactccatctgatagtcccagtatagcttttgaatcaccccagctcaggaaccagacatgcgagtgaagaagcatttagatgactctaggtcccagctggagcagagacaagccatcaccactgggccctgattaagttcctgacccacagaaactgtgagcataataatatttgttttacgccactaagttgggtttgttataaggcaagaaatcattgaaacagtgagagagccaccagcccatcacaattcactgtgaggtgtgtcacaagaaatttattaccaaaataactcatcagagtttcttttttgggttggggagagggggacagcgcctggctccatcgcccaggctgaagtgcagtagtacgatctatctcagatcactgcaatctccacctcctagtttcaaaccgtcctcccacctcagctttccgagcagctgggactacaggcatgtgcctccacccccacttaatttttgtaatttttgcagaaacggggtttcgctatgttgcccagactggtgtcgaactcctggactcaagaaatcctcctgcctcggcctaccaaagtgctaggactacaggcgtcagccaccacaccagctccaccaaggtttctgaatggttgactttttgttacattacaggggattcagaataaaattccattcttataatcctataactctcacttctttgtatcgtttgtttgtttgagacggagtcttgctctgtcacccaggctggagtgcaatgacaagatctcagctcacagcaaccttcacctcctgggttcaagcgattctcctgcctcagcctcctgagtagctgggactacaggcacatgccaccactcccagctaatttttgtatttttagtagaagcagggtttcaccatgttggccaggctggtctcgaactcctggcctcaagtgatcctcccacctcggcctcccaaagtgctggaattataggcatgagccacggctcccagcctcctttgcactcttgagtattttcttgattaggagtcagagggctgaagtacagccatacacagaaattacacacaaccaacgggcaaaagttgaagcactccctttgataaccaaaaacaagttaaatgttcccaggtgtggtggctcacgcctataatccctgcactttaggaggcctaggtgggaggactgtttgaccgcagaagttagagaccagcctgagcaacatagcgaccacatcttcacaaaaaaacttaaaaattaggtaggcatggtggcacatgcctgtagtcccagtcccaggaggatggctcgagtccaggaggttgaggctgtagtgagccatgatcgtgccactgcactccagcctgggtgacaaagtaagactgtctcaaaaaaagaaagagagagagagagagaaagaaaggggagttaaacgtaaaaaagctatttgtaaatgtcttaaaaatttacacataacctcacagccattcccactacattataaagtctgtgactagcagaacctcagtttgggtagggggcagcatggtgccctgcccaggacatgaatttctgtcccttttgcctgatacctgctttcccaggctccctcgcagctcagggtggccatgaaattaagggcttcttaaataatttatgctgggtacagtggctcactcctgtaatcctagcactttgggaggctgaggcaggcagatcacttgaggtcaggagtttgagaacagcctgcccaacacggcgaaactccatctctactaaaaatacgaaaattagccgggtgtggtggtgcgtgcctgtaaccccagctactcgggaggctgaggggcaggagaatcgcttgaactcaggaggcagaggttgcagtgagccgagatggtgccactgcactccagcctgggtgacaaagcaagactccgtctcaaaaaaaaaaaaaaaaagttaatttatgtaaaaaatgtaacagagcttggcaaaggcggagccccatacatgtgtttgttgctgttactcttattattttaacatatttttcttccttaatacaaacagaactctttcccacttgttcccttccttcctgcttagttcattggtatgaggatgtgagacccagagctatggcaaccattttgtgaccacaaggcaacaagtttagggtgtgaagctatcattttgaggaaggtagaacaaaagagtagaaaacggggtccttgctgatattaataagccattgcaccaaaccccagaatcccctaactccagacttactcttaggtgacataactgaatgtctttcttgcttaagtcgtgttaattggatttttctgtttcttgtggccaaatgtatccccacaaattcatctctgcatggccagcactgaacccagagaatgtggtcaattaatatttcataaaaattttaatcatataggacatgtctgagcccaggcatatgagtctcttcaattatgaatgttgcaatggaagaaaacaaggttgcaaatctctacttggagatgccaaggctttatagaagagattttgaactggatatattttagttttgcctgagcagcatccattactcctggtaacagtgcttcaattttccttcggaaatgacctcctttcctactccctcatttggctggacacatgactccaatttgatcaattagagcaagcactccatctccagagcacagtaacaagttttccttgtcctctctcatggtggcctttgcttaagtggttccctctgcttaggacagttcccaccactctcccacgaccaagtcttcacctggctcatttccacaatatcacttcctcctccaaaaatccttctgcatagtacaccggggtttctattgctttattttttattttatatatatatgtgtgtatatatatatatatatgtgtatatatatatatatatgtgtgtatatatatatatatttgtgtatatatatatatatatatattttttttttttttttttttttttgagacagagtctagttctgtcacccaggctggagtgcagtggtgcgatcttggctcactgcaacctccacctcccaggttcaagtgattctcgtgcctcatcctcctgagtagctgggattacaggcacccgccaccatgcatggctaatttttgtacttttagtagagacaggattttaccatgttggccaggctggtctcgaactcctgacctcaggtgatccacccgcctcagcctcccaaagtgctgggattacaggcatgagccactgtgtccagcctctattgcttttatatgctcaacaagctttcttatttttttttcttttttgagactagcatattacagcaacaagctttctttgttttatttttttttaagatcttgctctgtcatccaggctggagtgcagtggctcaatcatagctcactgctgcctcaaactcctgggctcaagaccacctcctgagtaactgggactacacgtacacaccaccatgcttggctaattttttatttttatttttgtagagacagagtctcgccatgttgcccaggctggtctcaagctcctagcctcaagtgatcatcccaccttggcctcccaaagttctggaattacaggtatgagccaccacacccagccaacaagatttcttatcctactttttctggagagtatttaccttcaaccacataaaattgccaatactatacaatgtgtgacctacaaaaatggcaagttcatgtggttcaacctaatatttagcaatccctacttcccaggacacacaaccgggacataggacccacccaccccctacctggccaatcaaagcattccattcattcccttggatgcggcaatcagtgcaggggttgctatgtgacctcggccaggccgataagagctcttccctgagatttttctcttaggactagagattctgccattttatctctgggctctggaaagattgagtctgtgtctgtaaataaatgaccattttcccccgccacatgcagttgaaagggatgagtctgagctgagccaagcagagaagagagctgtgtagggagagtgtcttggtggggttgagtctgggttcctttctctaaagctctgttccttgtagctttgcaatcaccccacaactttttctttttttttttatttttgagacggagtctcactctgtcacccaggctggaatgcagtgatgtaatctcaagtgattctcctgcctcagcctttcaagtagctgaaatcacaggcacccaccatgcccagctgatttttgtatttttagtagagatagggtttcaccatgttggcgagcctggtctcgaactcctgacctcaggcgatcctcccaccttggcctcccaaagtgctgggattacgtgtcagtcactgcacccacccccaattctgttttgaaggtaggcatacctcaccccaaagctggggtctccatagaaatcagaccacataccacccctggtaaagacccttcattggcttcccatggccccaaagaataaaatgttaactcttgaccacacctcacaaggttctgtagaacccacttgcttctcccacctactctcctctcactcttcccacttcagtccagacacactgcctccaacacatcaagcacactacttcctaagggtctttgcacatgctgttccctttgccaggaatgcttttccctgcttttctcacaatgcatttatttagctctgtcatcaccatccttcaccctcccacctaaagtaggcctcaaagtcattctctatgccatcatcctgttttcattcttggcacaacatttatttgccactggacatgcattatttactcgtttttgtttgcttgttttttgggtctcactctgccacacaggctggagtgcagtggtgcaatcagggctcattgcagcctcaacctcctggactcatttaattgcttatttgtttatttctcctccctctagaatataggcaccacggagcagggctttcttgttttgtttcatctattttgttcactgcgatagcccctacataggaccagttacataatacatgctcaataatgctttatcaagtgaattagagacaagattcctgatggttctgtgtgcaggttggaggcagtcagctttccaatcatggctctgctgttaactggctgtgtgatcttggagatgctccttaacctctctgagcttcagtttcctcatcttgaaaattgtgtgcacacactgcatatacctgtgcaggctttaaatgcagtcatacttattattggagtaactccatttcctaagcattatgtgccatgcactgggttgcatgctctttatccgtgcatcagggagggtttgggagcactgtgcctggcttgtgaaaagccctcagtacctaggagtcgtcatgactgacacaaatgagggtggttgggctcctgggtgaggaagcctcctggcctgtgattctctggtgcctctgtcctagcagcctcccaccctgtctgcctagatccatccccctccctcctgctccgtttctatttctgtctttctctcctcctcccctggcctcagggggcccctggctggcaagaagccttcctccttcttccccaagatcaggaaggtgttatcactgcagggcccctgcaaggactgggatgtctgtccctctcctctccccaaccagctttccttccccagccacagccctcagcctcacctgagaaactcctctccccacaccatcctccatgccctccgccagggtccctcagattccaggcagagcgacacaagaggtcttgtccctgagctcaccaggctagctgtggatatccaagctcagctaagctcatgggggccataccccagcttccggacacagaccccagaggcagcatagtgtaggggtacaatcaaacttccagctccgctatttattcattggggggatggagggactacggcaagtgacttcatctctctgtggttcaggttcttgtctgtaaaatgggaccaaggatagatctaccctaccccactgagttgtgaggtctcagagggtggaatgaatattcaataactgctcagcagtacagtgctctagttgagtattaaaggagttcagggaatgtcaccccaaaatatggcaccctggtatgctgattattttaaattaaaggcacttagagatccatagatgctggaagaggctttcctcctatgtcttcttatctgcctaaagatcaaaaagaacacaagtgccttctgtcctctccctgacatttcattatctttaacaggaaaaaaagacagagaaatgtctacacctggacggactttgtcacaagaaattatctgtctgtcagtctcaaattccagagacatttacaagctaaattctatctcctggacccatttattttccccaaaatcatttattacccctcaaaattgccttcctttccccatctcccctcctgtgaagaaaggtatataagtatataaacctcactgggttattgggtaatcactttcctgtgattttcctagtgcatgttaaataccctccatattccttttctcttgttaatctattgtcagcccattccagtgaaatttcagagagtgaaggggaagctgtcttttcacccctatagtagagactcagaagttggcctgcctgcctttttaaatcccagttttaccaccttgggccagttatttaacttttctgggccaaaattccctcatctggaaaacaggataataataccgatatgtcctggtgttgtgagaattaaatgacttaagtgcttggcacatagtaagtaagtattcactaagcgttagctattatgatcattttatttttgtgattattccccacctctaagtctctcagaggataaaagcctgtctgccagtctcctccggccccagttagtcatcttcccatcttccttcagtctcacttagagtccttatgctgcaatctaggtcaccctcccccaacacacacacacacacacacacacacacacacacacacacactacacgcggacacacatacagacacacacacaggtcagcagggcctcagacacagaaaaaagtttaattctgctgcggcggagggtcccggctccggtagggagggggatttggttttggattttgttcgtgtggggatttatttgggagagtctggtccttccagtgggacctgcccgggagaatgagtaaagagaagaaatcaggagagacagggagactagacaaaaccagggagggccgagggacaagagacgacaggacagagagaaaggagaggcaaatagggaaagacaggcactacagagagacgacaagagggcgggatagagacaaacgagggaaacagagaaagggggaccccaagccagacccgaccggaccaggaatgtgcgtggggtggggtgggaggctttggaggccgccgcgggacagaataggatctagtccagccagatacaagaaatgggcccctcgccccggccccgggtgacgggctgggggagggggctcgtgtctcagtgctgcagtgtcagggggccctgcccctccccgcgcttcgctgtgtaaggcaccggctccagcgaggtccgcgagcgcgcgaggggaggggtaggaggggggtcgaggagtccataggggaagggaggccggcagccggtccccgaaccccgccctgggcacgggggcgtggcctcgagccgcagcccgaggctgccccgccccctcccggggacaagggcgcgtctccactctggtccaatgtcttggcgctgcgctttctcccagtcccgccccagcgtccgtgcggctgggcgtttggtctgcggcacccaggcgtcccggcgcccgcccgccgctcacacggtactctccagcatccactcggtgctggtgaaagccaggcacgccctggcggagcccagccccaggtctccatcctccccggccgcgccccctccagccccgtccaggtgcggcgtggaccggtggcgctttgtccgccgggcgcggcgcgggtaactgtggctctggaatagtgccccgtagtccccgtcgaacgaatagcgctgctgcggcctcggccgggccgcggctcccccaggaactagagctagagtagggggcgccgaggttggtggctccagggcgccggatcggctccttcgagggcccaccgcggcccgagactcctccccggaagtttcctcggatggcagcaggcacagcgaggtggccgagccgcccagagaacgtccaaggaccacctccggctccgcggatgccgtctcggcctccatggccttggcctcgacggcgacggcgggggcagcctgggactccacctcgcgcagcgcctcgtagtggtcctgggccggcagggccggggcctgtgccgcgcctgtgcctgcgccgttggtctgcgagcacacgtggctgacccgcgggagcgacctggagcccttgacgcggcggctgtccccgtcgccatacaccttatagcggatcatgagcagaacgatgaagacgaggaccgaggcgacgatgacgcccccgatggcgatgatcatggtgccgcccaagaaatgggccctcagcgggcggcagggcgccggatccccagcggtggtgaactgtacacagcccaccactcgcgttgccggcagcgctgtggccccgtcgtcgtagaccgccagcacgcacaagtcgtaggcacggcccgccgccaggtcattcaccaggaaggtctgactggtggacgggatcatcctgtaggagggggcgggttcagggcggggttagtccccccgaaccacgccccttcgctttatgccccgcccatggtgaacagtggggactaaaccctgctatcgaagtctcagccgctactgagacaacagcagcaattcaagccccgcctccatcaacatattcccaccctttcacacccctcatctgtatgccccgccctcagacccacctcctggctgtgtcccatcacccactgggacaatatatctatcattcgtattacctcctctgcatatcccggcccctgcaggggagaagtgctatggcttttaagccctgccctcaagggacatgctccctagctatgtctcactcttgctaggacaactgccattcaaggtccttcatctaggcatttctaccccaaaactgggccaacgctactggccacctccccttttctgcatgccccatcccccactcaggtggacactaaggtcagctcacagcgcctgtcatattcctactggaacaatggatgctcttctagttcctcttttatacatattcctgcctttcagggaaaaccatgatgcaggtcgctcccccttatctgcatgcagcacctttgggtaaaacatctagctttggccggctgcagtggctcacgcctgtaatcccaacactttggaaggctaagaagggtggatcacctgaggttaggagttcaagactggcctggccaacatggtaaccctgtctctattaaaaatacaaaaattagccaggcgtggtggcaggcacctgtaatcctagctactcgggaggctgaggcaggaaaatcgcttgaacccgggaggtggaggttgcagtgagccgagaccacatcattgcactctagcttgggctacaagaccgcaagaccgagactctgtctcaaaaaacaaacaaaccaaaaaaaaaaaaaaaaaaaaaaaaaaaaaccatctagctttgtctatgtcctggaacagtttccaagtcccttaactacatgttccctgacattgctacaggccattccccaaccaaatgaaatgtggcttccaggcacaccccacaatggcccactaaggatggttcccctactgtgtataggccacatccagactacaggccctgctccttgtccagatattaaaggcaaccacctcatatgttcatgtgccaccagaagtcaccaaatcacgctaccaggtaagtttcttccgtaaaggggtcaaacgtagccaagcacacaccatattcctttcttgctgtaggcccctcccctcgaatgaagactagtgtagagaagtggttaagatgacaaaggctgggggccagattgcccgggtttgagtctctcctctgccacttgcttgctctgtgacctcaggcaagtttctcttttgtttcattttgttttgtttgagacagactctcgctgtgtcacccaggctggagtacaatgacgcgatctcggctcactgcaatctctgccttccgggttcaagtgattctcctgcctcagcctcccggacagctgagattacaggcacccaccaccacacctggctaatttttgtatttttagtagagatggggtttcgccacgttggccaagctggtctcaaacttctgacctcaggtgatccatccgcctcgatctcccaaagtgctgggattacagtcatgaaccaccacgcccggcgaacttcgccaagtttcttaacctccctgtgtctcattttccccaaatggggatgataataattcctacatcatagagatggtgtgaggaatgaatgagttaacacagccaggacctggcacttaatgatatcatcattagcttgcatcacacctcgtgttggccagtaacccttgctgtggctcacactatccagcccattgcattcctcccatctataagatctacccctctggagggccattcctgctaggccttggccctcttctgttgagcacatcgtttccacactgtgggccatgtccagcctcagctaaacctggactgcccgttccacattgattggcatggccaggatgcaacctcacaagctctcttctccagcaaagactcttggtgggtcccgggagacaaggactgccccttcctcttcgtgggaccatgcagaacaagctccaccccctctgacaggccacatccccacctccgaaggcctgcttatctctccgatgcttccgcttcccctccagcagagccaccttctggccctgaagctccacctctgtcatcccacctccaggaggttctcccactaccaagagccaccctcccaccaaaagacttccaatcagggccccgccccttcataaaggtccacccacttctccaactccactctacccacccctgactgccatttcaaagaccactgccacccaccccagccaccctcggctgccctggctttaagccttcctcctcctctcttcatctctcctctccagagccctggattccacttgctccttcccctaaatagccagttgctaggggcttcccccaccccttttcaaggacagaggctggctccttaagaaagcttcagcccaagtgtctctaattggctgcagaattaaagcaagcagctaagcaggcttctggttggctgccacctccgcccatgacagcgtgaggaagttaacccctgcggcaccatagcataggaatctgcaatgggggttggagaactggaactggggccctacagggaagagaagagtcccagggtctgttgcccagctggggacagggggccatcaacatctgcatccatgcagggtctgggggcttgtgaacctcccccaccccaccatgtggtggccatggctcagagcaaaggaaagagagggacagagaagtggagagtcacagaagctcagaattatttacagaaatatattatccatctcccttccaagcagtgggtgcccaacaaatgtgtgtcagtgtataaaggacagctttgctactttctgtgtgaccttgggcaagtgacatcccccactgaacctcagtttttctgtctttgaaatggagagggggtcatcacgccttcatagcggagctgggaagatcaagcttggaagttcgttgtgaaggtttgtgttttgttcatttgtttgtcctcatgtttgtaaggctgggccaggatctaacctatctcagtaggcccagggcccaacacaagatgggcacacagtaggcatctactcagtgtttgggaccagaatcaaaaagagagggaaatgaggaagacagagacaaaagaaaagggaggctttttttttttttttttttttttccagagggagtctcgctctgtcacccaatggcgcaatctccgctcactgcaacctccgcctcccaggttcaagcgattctcctgcctcagcctcctgagtagctgggattacaggcacgtgccaccacatctgcctaatttttgtattttccgtagagacagggtttcaccatgttggccaggctggtcttgaactcctgacctcaagtgatccgcccgcctcagcctcccaaaatgctgggattataggcatgagccatcgcgcccggccaagaggcatttttttcattcaaccaacactgggaaagcacctactatgtgccacacctatggccaagaaaacactggaaaggcagagatggaggccaagaggcaggtttctcggtgaagatctgacagccaggagctggggctctccacaggtagggaaacagctccagccccgctggcatctccaggtgaagccaagcagatgactgaagcatttaactggtgctctacaatgtgcatgagggaggcagagctagaaggagagacatccatgtggcaaactaccatttatcaagtgcctactgtgtgacaattctgtggcagagagccatactaaaaaactaccaagatgggccaggtgcagcggctcacacctgtaatcccagcactttgggaggccaaggcaggaggatcacttcagcccaggagttcaagacctgtctgggcaatatagcaagacctcatctctactaaaaatttttttaaattagcccagtgtggtggtgcacacctatagtcccagctactctcaggaggtaggaggattgcttggagcccaaaagtttgaggctgcagtgagctatgatcataccactgcactccagcctggggtgacagagcaagaccctgccaaaaaaaaaaaagaaaaagaaaaaaaaaaactactgagatggagagacatggcaaggccaggactgcaactcatagtgtactatggaccacgacctactgggctataagctccctgaggacagggtctgggtggtttccctgtgtccccagcacccagctcaggagtttgcacaaagcaggggctctgtgcctaacgagggcagagaaggtagagacagacagagaggtgaaaggagaaataaggaggcgatgggagaaaataactctttttttaaaatgtctgttgacaccgtatggtctgtccccaccagggcaatggcttcaaacccaagtgagggtggaaataacatatttttctcatacgttttgttttctgtttctgtaatgtacccaatgtgttggttcagtagtactggtatataatttataaatataaatgtcgctgtaggctaggcacggtggctcacacctgtaatcccagcaatttaggaggccaaggcaggcggatcacttgaggtcaggagttcaagaccagcctgcccaacatggtaaaatcctgtctctactaaaaatacaaaacttagctgggtgtgttggtgggtatctgtaatcccagctacttgggaggctgagggacgagattcgcttgaacccgggaggcggagggtttcagtgagctgagttcgtgccactgcactccagcctgggcaatagagtaaggctcagtctcaaaacaaacaaataaataaatgtcactgtaaatgtgtgtgtgtgtttcatgctccaaaatgtttaactgaagaggtgcacaatcagattgttgtggggagcagtgatatcgaccatgagccccatgagggcagggttcatgctgagctcagtcactgttaggactccagtgcccagccctggtcgggttcatgtaggtgctcagcgaatattttctataagcacgaaaaacagagacagtgagaaatagagagaggagacagggcaaaggagggcgggaacagctctcacagccatctagaaccctggctgagcaagaaggccaagggaatgggcaggtgggagggagggtccccctgggcttgggaggaggccctgggactgcagcacccgcacccacctgtagacgagggagtcatcaacggaactgttgtactgaacctggtacatgcgtattccgggcacaggcctctgggctggccagcggatgagcacggagttcgaggtgagctcggctgccacgagccgacgctcagccgcagaatcgttggcacctggtctgcccggcgtggcgatgtcagaggagccgggctcggtgagaggcggcggggcagccggcgggggtgccatcagaggcagaggtaccacgcacacctccacgggcgccgtcgcttccccagcagcattggaggcgatacaagtgaaggtgccactgtccctcaaggtggtgatggtcacatccagcgtcccgtccccccggacccgggtccggctggagttccccagcagccgcccatcaggtgccacccagtgcaccaccggctcggggtcacccaccgctcggcagcgcaggctcaccgcctggccttccaccaccagggcccggccccccgcctgccgtgtgatcagcgggggctcacacaggaactcctcctcggggatggaccagaagtagcggtcggtgaggtgttcgggcgtggcgcaggtctctaagtcgtcctcgcgggtcagccgccgcagccagagcagctcgcagttgcagtgcagggggttgccgccgaagctgacggtcagcggggtgggcggcttgggcccggtgccctgcgacctcaggaagagcccgtcgggcgggagtttatgcaggcggttggaggtcatgtccagacggaccagcttgtgaagctgcacgaaggtcccctccgcgatgtggtcgatgaggttgtggtccagcgtgagggtgtttaggttcaccatctggcccaccgcctcccacggcagggcctccaggttgttgtaggacagatccaggtcctccacggtggacaggaaggcgtcaaaggccgccgactccacccggcggatctggttgtttccaaggatcaggtggcggaggttgcccaggccgcggagctggtcgccgcgcacctccgccaggcggttgctgtccaggtgcagggcccggagggcacgcaggtcggcgaaggcgccagctgccacctggccgatggtgttccgggagagagtgaggtgcaccaggctggtcatgttggcgaagtctcggcggcgcacggcggcgatgaagttgtcggtgagccgcagctccaccacgcgccggtcgatggcgggcggcacaaagagcaagccggtcttggcgcacagcattgtcagtgtgggcgccacgttctggcagatgcagcggccggggcagggctggccacgagatgcccccgcccagagcagcagcagaaagggcagggcagcgggcggcggcgagaggagggccgaggagaagggtcctggagccatggtgcagtgggaaggcaggaggggtgggaggtgagacctgccggggaaggagccggttacccaggcgtgggacttggccgccatgggatgtcctgctacgagtcaggcctggatccctcccctaccgcctacagctgggttccataggatggtgagaggaagccactatcagctattaacaacagattacaacacttccatgctgggcacagtggctcacgcctgtaatcccagcactttgggaggccgaggcaggcggatcacctgaggtcaggagttcaagaccagcctggccaacatggtgaaaccccgtctctactaaaaatacaaaaattagctgggcatggtggtgggcgcctgtaatcccagctacttgggaggctgaagcacgagaatcgcttgaaccagggaggtggaggttgcagtgagccgagatcacaccattgcaatccagtctgggcgacagagcaagactccatcttaaaacataaataaaaataaaaatatctctatactggttgatagaatacccctgtccctacttgcgtgtcccaccctcacctctgcccctcctgtagtagctcccaaacctctcatgatctcccaaccagaggggtgacacctggcccaacctgggccctccagtacccactaaattgtctaaaaaatcactgttaactatggtttaaggccctggctatccaagccatactccctagctccaaatcccagctctgatacttactagctgtgtgacctccagcaagtatctgaacctctctgattctcggtttcttcatctgtaaaagggagatagaaacaggccttacttctgtgaggattaaatgtattgatgaacatagcatacttagaatagtgccaggcatataaaatgtgcttattacatgttagcaatcatcatcatgatcatcaagtgcttaatatgtaccaggcatagaacagtgccctattattgagagtaagtactttgaaatcaaacagactcaggttcaaatcctgattccccttttgctagctctgtgacccccaagccaatgatttcccctagctaggctgtaatttcttaatctgtaaattgggatgataattgtaccatcttcattcatgtaccaccgaccatgcctggcatacagtaagtactcaataaatgttaagggtttcccccctcccgcctctggcattggcagggagagtgtcaaagtgggagggactgaggaaaacacatcagagtcttccagttcagcctcaggaaggccttctctgaggtctggtttcatcctgggctcagttgagctcccaagcaaggcagactttcatgctcacatctttgggtacacacaacacacacacacacactcacacactcacacactcacgctatgtctctgctccaggcaaaaccttccggcagggattccccctgcggcggctgcagcccacgacatgtcagttcccatcacaacacagggtgggcggggggtgaagaggaaaggatgggaagggggcgtccctaaaactgttttcaccccaccctgccctgtaccctagcccctgctggcctacctcccaggaatctgtgtttggggctacggccttaggtggctttgatcttcctgccagtggggagggggcctgggacagagaccaggaaagtcagagacagaggtgaagagagacaaggagagaccagggggagggagaagtggactggcaaagagagagagacagattgggagagaaacagagagacaaaaagatgagtctgaaaggaaggtgaacagacagaaaactgagagtgaagaatgagacacagaaaagagagagacacagaaaaaagacacagagatggagagaaaaatagagacagtattagagagaaaaagacagaggaggaaagagacagagagtaagagagacaatgaccgggctgaaggcggaaaaagaggccggatcggggtgtcctaccatctctgagttcaccccaaatctgtccttcactccctctagatcactactctacaatgtactggaaaccctggcctagaaagggggactccagaattaggagcctgagtctgcccctgcttggctgtggggtcttcagggctcagaatcccagtctatgaaacagaagtccagagcctcgcctccgacagctggggtaggactcaaatggagggaataataatagcaatggaaatagctaacatttatggagagtggtgcagcactgcaggacagaatccgccctactgcctgggttcagacctcacctccccactgtgtgactttaatcaagtgacttcccctttctgtgcctcggtgtgctcatctgtcaaatgggaataataatggcacccacctcataaggttgctatgaggatttaatgagataatattttatgacatgcttagaatagttcctgacaaagtaaacactatatacatgtgagctgctgctattatcattattattattactattattattactaatttattattttctccagctttctcagccaccaggaggtcaggctatcgggagatcttcccacacccatgcacacgcacatacaaaatgggcaaacatattcactcaaccctctaaatgcaggggtcatttcatatcttgacatattcttgtatcctttactgatatcatgaggaaaccttgctttcccaaacaccttaaccatcctgagaatgaatgtctcttggcctgaaaccccccacctgctccccagagccacctggccaccacaagccctcacccaactttgatgttcctgaccttgtcaccactccccagccttggacagagtggtgggcaactggtccttcaggaaactgtcatcccctgaactgaaatccatgcgaggcagggttccagacccccagctggctgacagcaagccccatcaccccccatgtctctctctctctgaagccttacggctctactcacctctcttcagggagtcagggcctgggccagcacctgcaaaggaacagaaccaccttgttagcatcgttctggctcttctctgtgcaccagatcttgccttggagaccatcccggccaaggaagtccctggtgtgatcacgctctcagtcctcctgtggcgggttttgcatagtctcacaggaacccagaagtcctctctggaatcctagattaggcctcagggttgttcaccctccaaagcccaggagtcgaggactttagccctttgtcctctggggtttcaggagccaagaaccccagccccctcttccctctgacccaagagtccagaccagacctctggccctccattagaacccaagagtttacatcccagcccctcaactccaaagtcctgaacggtaccaagagctggggaagggccaaagtttcccatccttgccatgatactattgcccacaccaacatgtgtgtccatgtcagaacccacgcaagcccacaacccaagtctctacatctggatttctatgaacatagcaacatgatctgtgtgccctccgccctctatgggcacttggcctggcatatggacacactgtgtccagggaccccaggcgggaccccagtataccagaggtcatgccacatgggcctcaaacccactgaacccaagagtagggacagccttgtgccagggcacagacacatgtgtctttcacatacatgtctgaacatacacaacccccagagaccaacaccaaaacacaaacagactcacaacatagatggatacataccctcaaggttgacacacctgcatgcaacaatacatgtacaacactgactctgccatgcaagttcacacacacaaatgcacagatacaacagagaaactcatgtgccccctaacagacaaccaggtacatgcatttacaacagatctaccttgcacactcaccagcacacaggggcacacacatctaacaaacacacacacacctgtgcaaacatacacaagtgcacactcttaaatgcctagacacactcatacttcacacatctccatgttgcaaagttgatacagcaccacgctaacagatacatacctcacacacacacacacacacacaaaaccacaagcatacagatacgaggctgatccacactggaacacgcacacaggcacaaaaagatccacctttgcagacacgccaagatgttcactcataacagacacatgctcacacaacagtcctgtgatttacacacttccaaatgcatagaaaatactgaaccacagtagcacagtcagtagacaggcccagattcacactcacacagtcttggacacacattcctcccagccctgaggcacccccccaccaccccacctacttacttcccaggcccaagaaatcctaacatccctgcagcacattcagcatcctgccctccacacccccaaaaaaccagggcaaaagccaggccagaggtcagagttcagcaggtggaaactcaagaggatttgggggtttgagtcctagatcaccgtttcaaggagatcctcccaccagcagccccaaaggttccccagcctggccatcaggatggaggtaactctggctccgtctgcagatgtctggccggtgggggaattagggtggagtgggtggggaagggccgggtcttcgccccccaacccccacctcagggcccatctgtccatttctcggcctctcatcccccctccatctgtccacctcctggccgcccatcccccccccgcaaccaccgggaaggggaagacatggccgcttcccccaggaccgctaaggaccccccagttgacatggaccgagggagcggcgaactcccctcccccaaatccacaccgaggcctgggcgccgagcctcagcccccaagccagcaacctgccgtggactcacagatacacaccctcggagacatacaacccgcagacacacacacacacacacacacacacacacacacacaaatggacacccgagcgggcacacccggctccacagacccggggatggacatccaacccggacacaaacacccagagcagctagtcgcgcacgcacatgggcttgggggggacccacacctgggcacacaacccacgcacacacacacctgcacacagcccctccgatgggcgcgcgacagcgcccagacacacagccggaggggcggccgctcggggggacacgcgtgcacagccggacacgccggccgggctcgacaccccgcgcacacccgatggccacacgggcagggcgccgcacacgccggcaccgggcacacatagggccgcgcgggcgcacgccgggcccgccgcagcgccacggacacacactcgcacgctcgcacgctcacacccgcgcacacacccgcgcccccgcccgccgctcccgggccgctgcaggccgcgctcacccagcccgggggggccccgggcccggccccgccgccgctgcctcgctccgcgccatggtggggggagggccgggggagggggcgcggtgccgcggggccgcctccctcccgcctcccgccctccctcccgagccgcagccgagctccgccctccgcgccgcccgccgccaccgccgccgcaaggggggagggggcgccgactggtgggggcggccgggcggggcggtcgcacacccgggatccccgccccgaacccgccgcagacccctctccactgccgagccgccgcgggcccgcccccgacccttccccagccccacccccagccccgccggcctccccggagacccccccagaccacgccccaactggcctagggaccccggatctccctacagagacctcccatcacgtcctaatacccagggggacctcggatcaggcctcacctcttttgagaacccaggcgatgttctagggccacccaggaccacaaatcatgccctgctctcctgcttgacctcagactatgacccacacactgtcaggaaccccagaccatgcccccaaacccagaagaatcccagatcatatcccagcatccaaggggatccagaccaccccaccagcaaccctaaatcatatcccaacattcagatagacccccagaccacaccccttccctcacggaccccaaatcataccctaacatcgggggagacttcagaccatatgtcagccaaatcccagatggtgcctgactccctttggggacccaaaccacattctacagccaccagaaccacaaatcatattccactccttcttggggacccccagccatgtccttctaccctcaaggaccctaacccattcccttacccccagtatgaactccaaaccatgcctaacttctagggggccctaaaatgtctcttatccctatggaagacccttaaactttccccatgaaccccattagaccccaaaccatcttccacccctttgaccttacacctttctctctccttctcctccaagacatcctttggtttccaaaactccccaattagccccaattttttcccaccccctactagtcctgcccccttgaggaccctgcctccttcttgctccagttctttctcttggaccctgaaagtcccccctccctgtgacttccatagagcccagaatgccttgctccttcctagttcagacccctttgcccatcccctgtcccatagctgaaccccaccccttccctcaaaccccactgagtatctcaggccactctccttctctttctgagatattcacagggtccctaaacccagcaacttctcccctaaaaatctgtgttgtttcatgcagtgccccagattcctggggtctcaaacccttctcgttttggatcccactgtacagaggtcctcctctaaacccctttcctaatttttttttttttttagacaaagtctcactctgtcacccaggctggagtagagtggcacgatctcggctcactgcaacctccacctcccaggttcaagcaattctcctgcctcagcctccctagtagctgggattacaggtgtgcgccaccacgcccggctaatttttcttttctttttcttttttcttttctttttttttttttttttgagacagagtcttgctctgttgcccaggctggagtgcactggcatggtctccgctcaccgcaacctctgcttcccgggttcaagcaattctcctgcctcagccttccgagtagctgggactacaggcatgtcccaccatgcctggctactttttgtatttttagtggagacagggttttgtcatgttggccaggctggtctcgaactcttggcctcaagtgatccgcccgcctcagcctcccaaagtgctgggattacaggcatgagccaccgcacccagtctaatttttctttctttctttttttttatttgtttgtttttgagtcagagtctcactccatcacccaggcaggagtgcactggtgtgatcacagctcactgcagcctggacctcctgggctcaagtgttcctcccatctcagcctcctcagtagctgttttgtttttggttttgttttagtttttttataaatggagtctcactatgttgcccaggctggtcttgaactcctgaccacggtggtcatgagctactgtgcctggcctaaattatttacatgaagcccgccctatcccccagatcaagctcagctctgcagataactccttctggtgaaccttaaccccaagcgcaactctgagatgtccctggggacactcacaatccccctattctccagactccacccttcatcgccaccacccaggcagcatccccacctcccaccgtggttgctagtgctccctgctggagcttgggggtaggaataacaacaacaacacaagtgaacacatatacagcactatttatgtgccagaaatgattctaagggtttcacatctatcacttcattcaatctacacaacagccaaatgaagaggtcctattaccatccccattttatggataagggaaatagaggcacagagaggtttggtcacttgcccaaggtcacacagatagtatgtggcagaacagggtaggggtgatggggaaagagggtgagggtaggcctgggctggacaggagtagaaaagagagggagagaaaaaaagataataataagagagacagatggaagaagaaagaagctgaaaccgagggagatatgccttattcatagagccaatctggccctgtgagctctggtcccagctgaccctatttccaacgactctcctcttctgttccagcttcttcttcttcttttttttttttttctttttttttttagaaatgggggtctcactatgttgcccaggctggtctggaactcctgggatcaagtgatcctcccgcctcagcctcccaaagtgctgggtttacaggcgtgcaccaccactcctggcccctctttcagttttaacaatgacttttcttttcttttttgagacagggcctcactctgtcacccaggctggagtgcagtggcatgatctcggcttactgcaacctctgcctcccaggctcaagcgattctcctacctcagcctgagtagctgggaccacaggcgcccaccaccacacccggctaatttttgtatttttagtagagacagggttttgccatgttggtcaagctggtctcgaactcctgacctcaagtgatccgcccacctcagtctcccaaagtgctgggattacaggtgtgagccaccgcatccgaccccttgttcagcttctacgatgactttcctattcctccaacacaccagcccacagcagcagcccctgagcatatgcactcttctcccctttccatggctgctggttctttcttttcatgatggtcttaaatgtaatctcttcaaagagaccttccttttccatccccaatttacacacaccatccctacctgggcccccaaccagcagtctgatgttactttgaaatagaagaagaaggagaaggagagaagaaaggaagaagaaggaggaggaggaggaggaggaggggaggaagaggaggaggaagaagagaaaagaaaagagagaagaaaagaaaggaagaggaagaagaaggaggaggaggaagaagaaaggaggaagaagaggaggaagaagaggaagaggaggagaaggaggaggaagaagggtggctggatggatatatgatgaagtaataccttgacgtgtcagtggtggcatctaagtgatgggtatatgagtgttcactataaaattatttcaactcaggctgggcgtggtggctcacatctgcaatctcagcattttgggaggccgaggagggaggatcagttgagcccaggagttcaagaccagccgggcaacatagcgagaccccatctctaataaacttttatataaatatatatatagatatatatataatacacacacacacacacatatatatataattatttcaacttggctgcatgtttgaaatgtttcatagtaaatgttagggagtggggaagcaggactcttctggcggcaacaaacagccccaccaggtgccaccatttctatctagcacatcaccttatttatttcccttatagtatttatcactctctttatttttattttaaaaggaaaaaagagatgaggtcttgctgtgttgcccaggttggtctcgaactcctgggctcaagccatcctcctgccttggcctcccaaagtgctgggattacaggcgtgaaccactgcgcctggctcttgtcaccctcttattttgtttacttgtttacctatttattgttatttatttactgtctagtcattgaaatataagcctcccaagggaagtggcacggacaccaacatcttccagtgcccagaatagtgactgccacccaggaactcagtaaacgtgcttttcttaaagacagggtctccctctgtcacccaggctggagtgcagtggcgtgatcatggctcactgcagcctcgacctccccaggctcaggtgatcctcccacttcagcctcccaactacaggcacgcacccccacacccagctaattttttattttttgtagagaagcggtctcattatgttgtccaggctggtcgcacactctcggcctctaagatttccagcctcggccccccaaaatgtagggattacaaggtgtgagccactgcacctagacaacatgtgttctttttattttatttttatttatttatgtatttatttattttggagacggagttttgctcttgttgtccaggctggagtgcaatggagcgatctcggctcactgcaacctctgcctctccggctcaagtgaattctccggcctcagcctcccgagtagctgggattacaggcacgtaccaccacgcccagctatttttttgtatttttagtagagatggggtttcaccatgttgaccaggctggtctcgaactcctgaccttaggtgatcctctgggattacaggcgtgagccaccgtgcctggcccaacatgtgttctcaaatgcgtcttgggagaggactggggatctagtctggctccagactcagttcagggaccacaggaaggaataaataacgacctcttagcccaggttccctagaagaaaagggtatacccagcagctggagaatgtcccataaggtaagggaatgtgtgagttggcctgaaaaacgggcaacaggttgaactagacatcttaattgtttccctggagccctaattcctgccccaaacctaatacagaccctctaccaatcccattcttctggccccgccccaagcctaggccccacccccagactcttaggccctgccccaaagcaaaaactccagcccttttaaagctaagcaatgcccattccggccctttcaaggttaggaagtcccccaagtctagggcaccgactcaaaacttagggagcttggatctgtgggcgtttataggataggttggtggaactagaggaggcggtccccagtttgtactgcctctccagggaatctccccaaacccgaagacacgtcccattgtgctgactcctcattggatagtgcagtctgttctggcctctctgattggtccttccacaatccctagctgtactccctctgcattggactgcgcctgtgagccaccctttctgattggcccctgctttcccatgctttgctcctgatcgggcaagtccttgtgcatggctctttctgattggaccgtttgtaatcacaagcctggatgaaacagaagttccactatggagggtgggagtaccaccaaggaggacgaggaggaggggggggagggggagggggagagggaaggggaggggagggggaggggagcggggaggaggaggaggttccctaagtctcttgcctaagagagagtgtggccattgacccccaagatagcctgggcttaaagagttctaactgtacagaccacaggtgcctttggcttctatgcctcagatttttatcgtctttaagttggagagaataatagtacctttttcacgaggtattgcaataattaaataagctaatgcctataaactgcttatagaagtacctggtacataggaagccctcaagaggagggtcagctattagtattcatttgatcatgtaagtgcatgaccttggatgagtccctctgcctctctgacctctgcaggccaggagttccttgtccatttaattgaatgacccctcttgtctccagtcctcctcctcctccatctcctgccttcagggactgggcctgtgatcagagggagggacagagagatagggacaggaaaacagcactagtggagggcagaggagctcaacctaaccctccagagaatttagggcagggtgaattttctctatggaccagtgtagagtgattctatcccgaatccctcatgcaaaggacttgccctgattgggggtgagcgggcaagagatagggtagagtggggtggtaaggggatggtgtgttaaggctgggagggcttggagctgggctttttggaccctatccccggaaacaccaaggttgggggaacgggcagcccaggcccaaggtcactatgtctttgttaccatggcaacagccacctctctaccgggaacctgaaaaggggtggggggagggagttcccacgtccctgaaaccggggacagagaggggaacaattagaaacatggaagagaagcagagagacagaaagggtgtgattcatctctgtgaagacctgcccatctcggaattctcagagcccggtacattgtgggtacttaatcaatgtccctcagagacagacgcagaaagcctgagaaagttcgatgtcaagagatgccagaaaaaagaaaagaagaatcttcagatgggggcaagtgtcccttccctgtctcctcaatctcacacccctgggagtccaccgagggcccaggatcgacttcagcttccccagccctgggtgttcaggcctacctgaccgtacaaaccatccaccccccagcagctcctgagatcctgaagcaattacgttcaaacctcttcggcctttaaattcttcctatctaagggctcagctgagaaaagtcgcattcggtgatgcctcctaccccccagaggtggggagtgggggaggaaacgggcactttgcctcctttattctcaggggtccttgttccccttgggagtgaccgctctgtagatccagatatttccccaatacctccaggagacccaggcctcgcccatccgtcccccaccccccaaggaaatccttcaggcccttccctttctttctaagaaagaggtatcctccttccctcccgggacccagctcgcattcctctaggtcagcccgccccctgctggcccaagcctcgtactgcaggaaccgtcggctagagcccagaagaggcagaaactgagtccaaactgaggatctccgagtttttgcattttaaaatttatttaaagtcttggttgttcaggtcctaggggttccaagtccccagtcaccttgaggactcagacatcaggaattcagtccccagcccagagatcaacgaaagaaagacaacttttcttggagccaggcctcagtgaggtcatcagtggtgcggatttcgaacacctgggcagagagaggtctcggcattatgatctactcaaacactgagacagtggctgggcacggtggctcacctgtaagagagcactttgggaggctgaggtgggtggatcacttaaggtcaggagttcgagaccagcctggccaatatggtgaaaccctgactctactaaaaatacaaaaagtagccaggtgtggtggcgtgtgcctgtcgtcccactacttgggaggctgaggcaggagaattgcttgaacccaggaggaggaggttgcagtgagccgaggttgtgccactgcactccagcctggatgacagagcgagacccagttctttaaaaaaacaaaaacaaaaacaaaaaccactgagacagtgaggactctagtccctcttccctcagacccaggacccacaccacctctccctaacactctggagccccatcccagtctgaacctttgtgagctctgctgtctgcaccagcctgtttttactccctgcatacatcatctgttgttccggcttgcagcctgcgtggaaaagaggagaaaggcacatcagtggggacccaggcgtgttctctaaagctctagtaatgtcctgaaggccctgcagcttgccaagggtcctaggagctcttctaaggaggtccctgcactgtactcagtttctaggttggcttgggggcttcaagttattctgagggtctctggagatgatttaggggccagacggggatttctaggtgaaaggaaaaggtgggttggcttaggccccaggactgagaacgggtgggctcttggtgaatctgagcccccacctccacttcactgccctcccacatcatgcgtgcgacacacacacatcctcacccagtcacacacaggctgtcacatgctcacactcttacacaagtgcctgcacacattcgcatttacacacaaacacacacacacagaatcgaagaccctctcctgaggacagtagagctgtgtctcacccacagggctggagaagatgaaacacaaagggtaggacactcggccatcgtcatgcacgtacttgtagctgtaaaccacgaacctaccgtgaaagggaattgaaaatcaggactctggcctgcagcccaggcttaacagccattacctgagtccacagccttgaaatgttggctgagtctgagaacccagggttgatgtctgggactcagggtactgacctcaaacacaacaaatgattaaaaaataatcatagggccgggcgcaggactcacacctataatcccagcactttgggaggccgaggcgggtggatcacctgagatcaggagttcgagaccagcctggccaacatggtgaaacctcgtctctactaaaaatacaaaaattagcctggagtagtggtgggcgcctgtaatcccagctagtcaggaggctgaggcaggagaatcgcttgaactcaggaggcagaggttgcagtgagccaagatcacgccattgcactccagcgtgggtgacaaaagtggaactccatctcaaataataataataatgatagtgctcatttgactcacaattactttataatataggtgctattaatatccccatcgtacagatgagaaaactgaggcccaaagtcacttgcctaaggttctacagataggggagagatttgaacctgggaaagtgaatgccagcgtgtaagttctcaccccctatgcaattctgtccagtgcacttgaaccccaggtgcactgtgaccagtgatggctacagaatcatccaagcccggtataaaatgaaaatgtggggcatcttgttcaagaagcaggaaaattgttttcctttcttttgtagtctctctctagactgatcatcgtcttttttttttactgttattagagacagggcctcactctgttgcccaggctggagtgcaatggtgcgatcctagctcactgcagtcttgaactcctgggctcaagcaatcctcctatctcagcctccagagtagctgggagtataggtgcacaccaccatgcccagctaatttttttttttttttttttgagacagggtctcactttgtcacccaggttggagtacagggacgtggtctcagctcattgcagcctcgacctcccaggttcaggtgatcctcctgcctcagccccccaagtagctgagattacaggggcgtgccaccacatccagctaatgttttttgtgttttttgcagagacagagtttcaccatgttgcccaggctggtctcgaactcctgagctcaagtgatctgtccacctcagcctcccaaagtgctgggattacaggcatgagccactgcgcctggcctttttttaaaaaattttagtagaaatgggggtcttgttatgttgcccaggctggtcttgaactcctggccacaagcagtactcccacctcagactcccaaagtgctgagattacaggtgtgagccactgcgctcagcctgtcttttttagtttgctatttaaagtcgtgctccctcgggcatgaggatatgcgcaggcagagtgcagatgctcacaggaacaccctgtaacttgtcaggcaaggggtgccttctggaccctgaccctccctacaccagcaggaaacccaaggacagcagcggtcactgggtgggtgcagagagtgggtggctgagaacctgttcagggaggcagccaggtggtggactgcctgtgaacctagctccaaaccccagcacatttgtgtgaagtccattgtcccatctgacttcatacaaaacagaaattcaaagataaaactataaagaaggtgaccgttaacccccatgtgtgaggccccctcctgggtgcggggccctgtgcaattatcatatgcccatgaagctggtccttgttgagtcctacagcctctaatcctagagacccaaaatgaattcagtcaagatgaaaaatcttagcagaccagttttcacagaaatagtcaaagagctcttccaccaaaaaaagcaccaggctcatgtgacttcgcccaggattctacctgatagttaaaagtcgagtcattcctttagcagggtgcagtggcagtgcctgtagtcccagttacttgggaggctgaggcaggaggatggcttgagcccaggagttagaggctacagtgagccaggatcacagcactgcccaatagcctgggtgacacagtgagaccctgtctctaaaaatttttttaataaaataacaataataataattaatttgtttgctacctaaagtgttcccaaacattgaaaaagaaggaaaatttctttttttgtttttttgagacagggtcttgctctgtcacccaggctggagtacaggggtgctatcttggctcacttgcagcctcagcttcctgaactcaactgacccccgacatcagcctcccaagtagctggaaccacaggcacatgccaccatgcctggctaattttttttttttttaatagagacaaggtcctccaccaggcgcggtggctcacgcctgtaatcccagcactttgggaggccgaagcagggatcacctgaggttaggagttcgagaccagcctggccaacatgtctctactaaaaatacaaaaattatccagacatggtggtgggcccctgtaatcccagctactcaggaggctgaggccagagaatcgcttgaacccaggaggcggaggttgcagtgagtcaagatcgcgccactgcactccaacctgggcaacagagcgagactctgtctctaacaaaaaaaaaaaaaaaatagagacaaggtcttgctatgttgcccaggctagtctcgaactcctggcctcaggtgatcctcccgcctcaggctcccaaagggctgagattacaggtgggagtcatagtacctggccaaaatttcatttttaaaaaatgatgccagcgtaatgttgaaacaaaaactcaacaaagtttgtacaaaaaaaaaaaaaagactcttaaaccggtatcataaataatcggtataaaattctgcaataaaatattgctatacaaacaaaaagttctagagtatgaactcttggcctcaaacacagagattcttttttttttttttttttttgagatagagtctcgctgtgtcacccaggctggagtgcagtggtgtgatctcagctcactgcagcctctgcctgccaggttcaagcgattctcgtgcctcagcctcccaagtagctgggattacagtcacatgccaccacgcccagttaatttttgtatttttagtagagacgggatttcaccatgttggtcaggctagtcttgaactcctgacctcaagtgatccaccctccttgacctcccaaagtgctgggattacagggatgagccacctcactcggccaaacacagagattcaaagtccatgaatagggctggaactccagcagtcccttagcctatacctccaacatcacccctcccctcatggcctgatccaaccctttcttcccccaggatacctgggctgtctctccggcaactccattttgagctcctctggggaaatgttctgaggcaagaaaacagaagaaaagacaaagaatgaggcagggcgcagtggctcacacctgtaatcccagcactttgggaggccgaggcaggcggatcacaaggtcaggaaatcattcagaccatcctggctaacagggtgaaacccgtctctactaaaaatacagaaaattagccaggcatggtggcatgcacctgtagtcccagctactcgagaggctgaggcaggagaattgcttgaatccgggatgcagaggttgcagtgagccgagatcgcgccactgcactccagcctgggagacagagtgagactccatttccaacaaaaaaattagccaggcgtgttcaggaggctgaggcaggagaattgcttgaacccgggaggcggaggttgcagtgaatcaagattgtgccatagcactccagcctgagcaaaaaagatcgaaactccgtctcaaaaaaaaaaaaaaaaaaaagaatgaccacctttaggtgagcacttaccatgtgccaaggcatcgttctatgaaacacacatggattaattcatgcaactatcccgtaagtctgtggggtaggtcccatcattatgcccactatacagctgagaaaactgaggcccagaggtgttaaggcatttgcccaagattgcacagatagaaagcagcagagttgagatttgaatctgggttcgaatcataactgcttcactatactgcctttcagagggcctgagagagccccagcccccagtctccatggattcccttataaatccttatcgcaacactagagaaataagccttattatcattcttgttattgataaagacagtgaggccaccaggggggtgaggtctacccccttttttttttttgtagagatggagtctttttttttttttttttttttttgagacagagtctgtcgcccaggctggagtgcagtggcacgatcttggctcactgcaagctccgcctccggggttcacgccattctcctgcctcagcctcccgagtagctgggactacaggcacccgccaccacacccagctaattttttgaatttttagtagagacggggtttcaccatgttagccaggatggtctcgatctcctgaccttgtgatccgcccgcctcagcctcccaaagtgctgagattacaggcgtgagccacggcacccagccgagatggggtcttgctttgttgcccaggttggtctcaaaactcccagcctcaagcaaccctcccacctcagcctcctgtgtagctgagatcacaggtgcacaccactgtgcttggctaatttttgtatttttagtagagttagggtgttaccatgttgcccaggctggtcttaaactcctgggctcaagtgatcctcctgcctcagcctcccaaagcgctgggattacaggcatgagccaccatgcctggctagctttttaacttatatggaaactctttcatttaaatgccaataaagcattattatcatcattattaagatcatcatcaccttattgagcacatactaagtgccaggccttgttctaaacccattacaagaattaaatcactggatgtaaaaacaagcctatgagataagtactattctccccatttcacagatgaggaaatagagacacaaacaggcaaagtctcttgctgggggtcatgagtgagctagaacttgatctccagggttttttgtttttttgttttttgtttttgtttttgagacagagtcttgctctgtggttcagactgaagtgtagtggcacaatctcggctcactacagcctccatctcccgggttccagcgattctcctgcctcggcctcccaagtagctgtgattacaggtgcccaccaccatgcctagctaactttttatatttttagtacagatggggtttcaccatgtttgccaggctggtcttgaactcccaacctcaggtgatccacctgcctcggcctcccaaagtgctgggattacaggcatgagccactgtgctcggccaatctccaggtctttctacccccatgccaggctcttcatatcagttccaaccacttggttctcccagtctcaccctgtacctcccagtcccaatcaccccagcccatcacctgaaattcttcctccagcaccaccatctgccggtctttgtccaccttcactggggaggggtggcacacagggattagacactccccctgatccatgggggacacaagcccagccctccctatctgccctcaccaccgccctcccatccttctgtgggggaagatgtcactcacttatgatggctgcattgtctgtctcttttcggaagcggaatttcctcagcttttctgttagctctgggtctacctcgcacaccaccagggagtcagactgccggagggacccaggaagagctgaaatggcctggcctcagccctcaccccttccccaaacctgtttctccatccactaatgaagaggagcatcgcgccggcccatctgatgcctttgtgaacattgagaaaaggcacccttcccacagagtagatacccctcaccagggcactcagcttggggggcggagcagaggctgggttcccgccttctccacggggactcttgggggacactcaaggaggtgcagagatccacttcctgagcctaaacccagagccactgtctctctgttcttccagccgggctgttcaccacagttgggcccccttcccggcccgtgacctccatcccatagcctgaccttcgcccaggtgtcctccaagccccagccccaaccccagccccagctcttcccatagaacccctggcccctgaccatgattgttctgtccacaggcctcttcttttcttagttccgctgtcttctaggcgtggggaccggggctgtaggggggcgggctgtgcagtaggaggaaggtttcatccaacaccacatcctgtttatgccctttctgggacaactgtcacagagggctcctccccctccttccttcccctcatctgccaggacctgtcaggaaatcgctcagaccagggttccaaagcttccttgctgtgtgaccctagctaagtaacttcacccctctgatttgagattgtggtgaggatataaatagcttcacatcggccgggcatggtggctcacacctgtaatgccagcactttgggaggccgaggcgggcggatcacctgaggtcaggagttggagaccagcctgaccaacatggcaaaaccccatctctactaaaaatacaaaatattagcctggcatggtggtgcacgcctgtgatcccagctactcgggagtctgaggcacaagaattgcttgaatccgagcagcagaggttgcagtgagccaagatcacatcattgcactctatcccaggcaataaaaatacaaataaataaaaataaataaataaatagcttcacatagctgccagcatggcagacacaataggtactaaaaacgaactattttgctcctcccctcctccaggtggccttcctagatttacccccatctgggatatttgaattgcagggctggaaaaggggagtttagtcttttgctggtcagactgacgcccattatgtcaatggcaaaatggggaccagaggggcaaccccacagtgcctgggtaatggtgacttttttcctgcacttttccaacctcactagccttgcaatgacctatgaggccctacaacaagggagttcaatcccgtcagaccggtacccaattttttttttttgagacagggtctcactctgtcgcccaggctggagtgcagtggtgcgatctcagctcactgcaacctccgcctcccaggttcaagccattctccggcctcagcctcccaagtagctgggactacaggcacgtgccactacgcccggctaatttttgtatttttagtagagatggggtttcaccatgttggccatgttggtctcgaactcctgacctcaaatgatccacctgcctcagcctccgaaagtgctgggattccaggtgtgagccactgtgagccaccatgcccggctattttttttattgagtatttttgcactgcccccttttcccatcccgaaataaaattcctagataatataacctacttacacacataaattcaaaaaaaaatcaatataatgtcctgactgtcatataaagaagaaataaaaggaatgtagttcacacaaaaaccatatgtatttcagtgagaagataaaagcaaacaaaagacaatttccacagggtcctaggccaactgtgactggcccacttccctccatggtgggcaaaccccggaccctacactggactctaccccttcacctacatctctgcagctgtcctctctctccctcttgtctcaccaacgtccccatgcctcctggatctttctccttagcctccatgcagtgttacttcttccatcttaatttttttcttttctttttttcttttattttgagacagggtctcattctgttacccaggctggagtgcagcggtgtaatcatggctcactgcagtctccaactcctgggctcaagccaccttcccaccttggcctcctaggtagctgggactataggcacgcaacaccatgcctggccaattttacttttgatttttatagagacaggatctcgctatgtggcccaggctggcctcaaactcctggcctcaagcgatcctcctgcctcagcctcctggtgtgcagggattacaggcgtgagtcactgtgtctggcctcttccatcttaaaaacataaaactgtatctcctgtccagctgctgctcactcatttccttcccttttctgcaagatttctcaaaagaggccgggcgtggtggctcatgcctgtaatcccagcactttgggaggccaaggcgggtggatcacgaggtcaggagatcgagaccatcctggctaacaaggtgaaaccccgtctctactaaaaatacaaaaaattagccgggcgtggtggcaggtgcctgtagtcccagttactcaggaggatgaggcaggagaatggcgtgaacccaggaggcggagcttgcagtgagccaagattgcgccactgcactctagcctgggtgacagagtgagactccttctcaaaaaaaaaaaaaagatttctcaaaagaataatctacattgctgcctccaatttctcctcccagttttctcttctgccttctccaatcagcctttcacctgtattcctctcagctgacatgcccttgtcaaggtcacccatgcactccacggtgctggatctaatggtcaattctcactcctcctcagccacatctgacacagcccatcactccctgttccctgaaacatcgtcttcatgacaccacacttgcctggttttctttttttcttttctttttttttttttttgagacaggggtctcgctctgtcacccaggctggagtacagtggcaccatctcagctcaccgcaacctccgcctcctgggttcaagcgattctctcacttcagcctcccaagtagctgggattacaggcgtgagccaccacacccggctaatttttttttttttttcttgagatggagtgtctctctgtcacccaggctggagtgcagtggcacaatctcggctcactgcaacctccacctcccaggttcaagcagttctcctgcctcagcctcatgagtagctgggattacaggtgtgcgccaccacaaccagctaatttttgtatttctagtagagacggggtttcaccatgttggtcaggctagtctcgaactcctgacctcgtgatcagcccacctcagcttcccaaagtgctgggattacaggtgtgagccaccgcgcctagccatatttttgtatttttagtagagacagggttttaccatgttggccaggctggtctcaaaccctcccatgggccagacacagtggctcatgcctgtaatcccagcactttgggaggccaaggcaggagaattgcttgagaccaggagttcaagaccagcctgggcaacatagcaagaccttgtctctacaaaaaaattttaaaagtagccgggcatggtggcatgtgtctgtaatcccaggtaccagctacttgggaggctgaggttgggaggatcacttgagcccaggagtttgaggctgcagtgagctaggatcacaccactgcactccagcccaggtgacagagtaagatcctatctctaaaaaccaaacagcaggccaggcgcagtggctcacgcctgtaatcccaacactttgggaggccgaggcaggcagatcacttgagtccaggagttcaagaccagcctgggcaacatggtgaaaccccatctctactaaaaatacaaaacttagccaggtttgatggcatacggctgtagttccagctactccagaggctgaggcaggagaatcacttgaacccaggaggcaggggttgcagtgagccgaggttgcagtgagccgcgatcgcaccactacaatccagtctgggcaacagagtgagaccctgccccccccccccacacacacacacacacacacacacacacacaccaacaatgactaaaatactaagttatctgtcaccacccctaccccattgcctcttggaccttgtccttcactgccctcttttgctcactccactccagcaatgctggcccctttgtggttctgtgaatgatcctactacatggcctttgcacttgctgttttctctttctggaacccactttctccttcattccttcagatttctgtttcagtctcacctaatgaaagaggcctttccccatgtaaattaattctggctgcattactccattcccttagctgctttcttgttatttatttgtttatttatttagagacatagtctcgctctgtcacctgggctagagtgcaatggcaaatctcggcttattgcaacctccgactcctgggttcaagtgattctcctgcctcaccctcctgagtagctggaactacaggcacgcatcactatgcccagttaatttttggcatttttagtagagacagggttttgccactttggccaggctggtctcaaactcctggcctcaagtgatccaccagcctcagcctcccaaagtgctgggattacaggcatgagtcaccatgcccagccactgctttctttttctccttggtacttatcacgaagttacactgtatttccttattgtttgtgtccccaagaactagaatgtaagtctttttgttttttttttgttttttttttgagacggagtttcactgttgttgcccaggctggagtgcaatggcacgatcttggctcactgcaacctccgccacccgggttcaagcgattctcttgcctcagcctcccaagtagctgggactacaggcatgtgccaccacgccccgctaattttgtatttttagtagagatgggatttcaccatgttggtcaggctggtctcgaacacctgcctcggcctcccaaaatgctgggattacaggtgtgagccaccgcgctcatcctattgttgtgtttctagcaccttaagcagagcctggcacatattagatagtcaagaaatattattgaatgaattaatgaaccagcagttaatgagcacaataattctatgcagtgtgaaggctgttgcttaaatgcaggaggtagtggatggggtttgtgacatggccccaccctggtgaaacagcctttcctcaaagcgtctataatgccacactctcctggttttcctctctctggctgccttttgcaatattcatcgacagcgtcaattcctttgctcaaatcctgcctctctgtttcagggttctgttcagtccctgtctccagtgacccttcataccctccccgggctagacccctaactcccacagcctcaattaccatctttgacgatccttaaatcttggtctccagcctcaatttctcccttaagctccagacccagggtttgtgcacctcctggacctcgctactaggcatccacattgggcttagtatcttcccaacctgcttctggcgcccagtctcccggctagaggggcctggtcctaaacttttctcccccttccactccatagccagccagtgtcagggcccgttcgctctgcctccagggcgtccctcccacctgcacctccttccctccccacagtccctccctcgtgcaaaccccctctttcttccccaccccctcccccagctgcctccctggactcccgatcccgtttcattccctccaatccgccctccatgtataagccagagagacatctctccaaaaccccagactcaccatgatcctccccggcttgaagcccttcacggctccctagtgccctcgggacaagtccaaactccctcaagtggccaaacaactggcctctgctcgttcctcacccctccctgtcttcaactcgaccctccatcccgactgcctctctaagtgcctgtaacaagccagatctctgtcaccgagagccttctgaacacaggtccctctgattagttcacccggacccaatacagtttgtggaacgcacagatcacaaccaaagtcacagcaacaactcccgtttattgacagcctccttgatccttagcgctttctgtgcattctcttcccaccctaaaggctagatctcgcctcgccattcccatcggagagagcaagcggcaaggctgagaacagcgcgatgagaaagccgagcgcccagaagcccgagtgcagacgcccactgaggacagccttgggtgaggcgggccacccaaggggcggggaagaggaggcctggaacgcctgaatcaggaactgtgacttcgctcggggcagctggggtggacgcgcgcgagcctgccccctgcgggcctggaggcccaacctcagactccgccgggcccgttgccctgggcaacgccccgcgcgccccgccccttccccgccccccagccccaaaccccaggcctggccgactgcccgtcacccccacgtccgaccaatcccgccgaggagggggcgggcctcttgggccccgttccaccaccgtcgctcccccctcgccgcgaccccgccttactcggctcacacctcccgcccttcgggctgccctcgccgcccgttggctggcgcgccgttcgtcacccgggcgtgagctaatgccggcgcgcggcggcccccgtcggggcggggccaggggcggtgacgcacggcgcggtgacgcagcgcgacggcggcggcggcggcggcggcggtggtcggtgcgggaggagggaggggagcttgcgggcccgagagggggcgacggcggcggcggtggcctgaggaggcccgagcggcggcggtggcggcgaaggccgaggcggtgagtctcgggccgggccggcgcggggcggcggcgagtcggggcgcgcggggctcccctcagggcgacccaggccgcgcgggcggccccgccccctcagggaccccgaaccgcgggcggcggcggcgggcgggtgcggaacgcgggcctcggggggccgggccccacgggagaagccccgcgcccgtccccagtctccctcctgggccctggccgaagcttccctccgaaatctttctcatgccctcgggattgccgaggggccgggccgggggcctctcctcaggaccccccgcacatccccctcggagagccccggaaagcctgccgatcccccgtgtgcgccctgaaaggtccccgcaaaacccacccctcccgtggagtcgcctcctcgagcccttcatgggtcccagcagctttcctcgcagacccccgccctttggccccgaagcccccgtcctcctcctgtctccagaaatagtcctcggaggccactcctcgtccattccacagcgtggctctcatagctgctccaggagcctccctcacgagccctgcacacctccccaaggctccctccggacccctgtccattccagaactctcccccggagccctgcctctcacagcccaacaggctcacccgacttccccctcccggatcctaagaattttccctcccacttaccccattccagaaacctccttggagattttccgctcataccccctgcatttctgattccccctcccagaagtccttcagaatgcccccgacggaccgtgatcatcttccctgaagatctccttcccatatccccaaaataaatcttcctcacagactttgtgaaatgcccccagatcccaaaaactcacctagaagactccatccccctccccaccgtattgcaaccatctctcatacacactcccccttcacgtatccctctggacctttccacagatcccaaaagtctcccccagaggcctcctgtctccccctggtctcaccaccctaaaatgccctagagatcaccctcatgtagcccagtgatcttcaccgggatccccttccccacccccactcattctaaaaatctccagcaattgcctgaaatctccagaggactctcagcatcatattccaaaagcttcttccaaaatcccttttacatactccacatcttttccagtcccccacatcacacgctccaaaaattgtttaaggatcctgaaaactttcctcatggtttttctctcagatcccgtagaactccccttcactaacacctcagaatccccccttgcagaccggttttagaggaattttctgaagatcctcctcacaacccctgtaagaccgtaagattctcttggtgacccctctgatatgcaggttttcaggaccccccccccccacacacacacacagcttagagaccccagcgaccccctggagccctcctgacgtatgttcttgaaatccctccaagaccttcctgacaccaccagaaccccttgaatcaatacttctgccttactaagggacttttctagagatatccctccctgaacttgctcacacaggtcccctaaatcctctagaatcccttgaagaagaccctcacacacacctaattttcccccaaaataacccgagctcttgctctgagaaagtcctataattctttctgaaaaaccctctcctctgacactctctcagaagaccccgccttccccatatactcttttggagactttactcagctttctcctcaactgagatctctgaagagtttttcctaaaaacatccctctgtcatcccactccaggaccagtctcagaagaccacaccttcctcagacactttttagagaattttctcccaaattgccctccatcagccacccactcccagcgcttcctgagacttcctcagaactttccctcagattccacttctgacatccccaagaaacattatttaggaccctatcagatttacccactaactttagaattgctatttacaccctctcatttccccattctctttcctctgaagtcaactcagagacctttctcagggggcccccttttcccattatcccttcagaggtccccaacattctccagactcgttgcccaagagcctctatgtttccttgtaaagattcttgagagacacctttccccgcccccttgaaatcccagtgctccgagatctttctttcagaccatttttcttaggtgccatgctcatagacccctcttcccttcagagatcaagagacccttaacaccctccttagagacttaggattctccccatttccctttcagaagccttcttccttctcccctttgaggacctcctcaccaaataatcccttcccctatagcagtggttctcagtgtggttcctggcccagcagcagccacatttgttagaaatacacattcttgaatcccactcagatctactgaaactgaaaacctgggagcagggcccagcaatcaagagtttttaacaaaccctcctggtcattttgatgcacacgcaagtttgagaacctgtgccctttaggaggatttccttttcctcactaaaagccccctgaaagatgcctcagggtatgcctctgtgccctactgcccactgctgctttcctgtttcctaggaatcccctttatgaagtacccatcctccagaaagatttcttacctaccttgaaaggatcttggcttctccacaaggttactccatcctctgagcagttatttccgattctacttttgaatggtttcttttcagatcttcctcagtgctttctctttctggctacccctccagcccactaccagcctttggtgcttctttaaattgctgcttctttgaacacacatatccatctcttcttgtccatctgtttcttcacataggcaccctccccttgaggcaccctcaggaggtcttttcattctgtgtcttactgccaagacccctccacctccattgtacctcttagaacaccactcaccttcaaccttgtagattttaatgtacttgtccactcaccctcactggactaggaactctgaaagtacgggatgtgtcttgttcttctctgaatcccacaaggtgggatctactctttgtaagttattggaaatcactggagaataagcagctcttccttctgcatttggccagaaatctccaagttcctcagatctcactcctcattcaggtttagtacaccttccctgccccctcctctcctctcacctcccttttttttctccacacagcaccctttgcctttactcctgccctacttgctcctgtcttagggactttctttgtgctgtttcctgattctgagctaccccaagtcctttgcctggtgacctgcctcacccgtcctggttggcttctcttagcagcccctctcagctgctaagtctggagcctccacagagctcttggcattttttcaagggattctgtttctagggcccagaaggggaaacagagaccccagggtaaatattggggcctgccttcagggagctcacaataccagtagggggcttgggcatgtacagagcagaaaatgaggtacaaattatatgctgtagaaattcagcagtgagagggagccttttatttggaaagacttcacagaaaaggtggtatttgggctggatagtgttccatgggagttgggacaatgatggtgcccccaggcagaggaaacagcttaagcaatgggtcaaagacaaagcctcctcatctctcacccatggtatctcttctcttcacccaaaagatagagatgaaagaagacagatttcctccatttgcattgtatttgccagctgcactttagtgacctacagagtaataataataatgaccactggtttttgaatgctttctaactgccaggcactgtttaagtgctttacatgtattcataggaggtaggagtttacctaccctatgaggtaagtaaactaccattatcctcattttgcatatgatgagattaagaacaggtaggactaatagagggtctgtgggcactgtccattccaagatggtagtgccttgggtcaaaaagtttgatttttagttaagataggtttggctgcaatggggcagtagttgttaggtatgcagaccctgggtctggacaggatttgtatcccacattaccactcaccagttttgtaccctaggacgagttacttccctggtcttttagtttccacagctaaaaatatgaaggaaataatgatactttacttcatagaattgttacgaggattaaataagttaatacatgtaaagtacttagaacaatgtcttgcccataattgcaatgttagaaaaacaataaaataaaaaaaaagctcatatcagccagaactctaaaaacataaagtgatagaaccttagctcaaagtggtttaatgaaaaaagtgggggattaattggcttttgttactggaaagtccagagctaggttggcttcagacctagctgcatccaggtgttcaaataattttctcagtcatctcctcccatttctccactgagttagcttcatcctcaacaagcttctgctttggatgacaaatatggtcctcagcagccccaggttttaaccctacctccttggaaagccttagtggaaagagaactctttcttgagagtcccagtttgaaaatagtttcttccttgaatagatgtgagattatgccagaagatccttagaaacatattttgggttctgtaccctgcaactcagtctctggcttgctgagccaaataggcctgtgattccatccgatgaactttctgagcagtgatggcaatctccctccccactgtcccccagccgcagtcattctctgctctgtgattgtttgggtctagagagagcttgtggctggtctgactcaaccacactttgctttgggatatcacgggtgatatgaggtgatcagcctggcttgatggtggcctcaggggagcagaatccaggagtaatggcaataccctcaccacagtttaaggtttccaagacacagaactttggaagagagttaagtaggattgctgtgagtggagttttgttttgtttgttttagtgtaaacttgttgaatagaagcgggttcagggcaagttacagaacagcagtgtatggagtatgcaagtctcaaatatctccagcctgcactcattcattaatgcatggaggcactattctaggtactggagacagagcagtgaataaaacattcaaggtcctgaaattcatggaatttatattctgatggggggaggaaacaaaaaaatcagagtgtgattcatgctgtgaaggaaataaaacagtgtgaaagagagggtgggagtggccactgtagtagacagggggatcagaagaggcctcttttgggaggtgacagttgagcctgataaccagaaagatgagaaggcaccagttgtgggaagatctgggagtggaacattctaatctaagcattgttacatgcagaaaaaggacctctgcaaggtggggaaatttatcacagatatttattgagggcctgctatgtaccaggtgctatgctaggaattggagatgtagcaatgaataatatagctacagtcttcccttctctcatggatcttacagtctaggtgtttttggaagagctgcagcctttgaagaaacatctcttgatgatgatatcatagactccttcctactgggcagatgaggcagaatggggcacaggtgagcccagatctgattgatgagaaggaaccaaccttgtgacggtccggggaagagcatttcaggcagagaggtcagcaggtgcaaaagccctgccatatgttcagggaatcgcaaggaccagtgtggctaaagcctaagtgagggagaggggtgagggttggaaaggctgacagaagccagattacttgcagcctaagggccacagtaaggagtttctattttcatttaaggggattgggaaactattagaagggagtttttaaaagcaagacagcgacatgatctgattaatttttttagaaagctcactttggtttctgggaggaaaacagagggtcaggacagaatcaggaaggaaagttaggagacaatccatttgtccagatgagaaatggtgacatgaatgtggtggtggtggtggtagtgaagatgtagagaagcagatatattttgggtgtacagaaaacaggacttgatgatgggattagagaaagagaggaatctagaataatgataatagccaagtcatttatgcctcacaactctatgagagtaggcactattattattttctgtcttccttctcagtaggtactattattacacccacattacagatgacaaaacaggcatggcaaggtgaaatcacttgcccaaaattacacaggtagtaagtggcaggcttatatttccaacccggcagtctggttctagagccacttaggtttggggaaagataagcaaggcatgtgtagctgacattaagaaaaaagaaatatcaagacctaatgactgggtctttgggaaatggaagaagtcaaagatgactcaaaaaaatgtctcagttgtccacagagaggtgatgattgaatctacaggagttaattacatgcctaagtgagagaaaacaagtgtaaagaagggaaaggaagcagagaataaacttttcggggggaaggggtgtcaagacatttaggagtgggaggaagaatgctagcttcctctctattccagagtttaccggagctccccatactgtacttatcttccaggaggccctgcctggcttctcctctcctctccctcccttccccagcaccattcatacaaaaagctcattctttgctaatgcagtggtgtacatgttttgtgtacgtatttcaggagtttctggaaataatggttgattcttataagagaagttgtgctcccttggcttctgacagtctcttctcaggttatgaaagtgagttaaccctaggtaactagcctgttaccttgttcatgaagtgtaagttctcaaaggcctaggtcgtgctgtaaaaagaactaggaatgggtaagaaggcagataggatccccttattcatccagagatgttggtattaaagggcccttaggcccaactttcaccttgttgcccaggctggtctcaaactcctgggctcaagcgatctgcccacctcagtctcccgaagtgctgggattacagatgtgagccaccatgcccagctttcttgcattgttaagagcaagcaagagctctgaagccagactgcctggccttgaaaatctcagcttggtgtacagtcttgggcaaagtgacttaacttctctgtgcctcagttgctccatctgtaaaatgataatatattcatatatgtatgttatatatttttgaaatagagttttggggatcaaatgtgcttatctgtggaaagctgttggcaaagggcctgacaatgtatgatgtatgaagacatgctaagcatcatgcttgctattgaaatgaagtatagaggaggaaaaaagcatcatgcgcggtatttttaaatacattgtttcatttaattcttctaacaagcttcattgaggaagaaacagagttacttgtcatagtcaatacagcaagtaagtataacaggagagccaggatttaagccaggtctgactaactccaccatcctgcttctgaatgaagagagctggactccagaggcactgtttatgggcatatgggccttttctcactgtttggggccagagaagaagcccagagggcagtttgtcctggaacatctcagcatttttttgtttttgtttttgtttttgttttgagacaaagtctccagtcccccaggctggagtgcagtggcgcaatctcagctcactgcaacctccacctcccaggttgaagcgattctgctgcctcagcctcctgagtagctgggattacaggcgcctgccaccacgcccagctgattttttgtatttttagtagagacagggtttcaccgtgttggccaggctggtctcgaactcctgacctcaggtgatccgcccgtctcggccccccaaagtgctgggattacaggcgtgagccaccgtgcccagcctttctccaggtgggagtgcagtggcatgatctcagctcactgaagcctcgacctccagaactcaagtgatcctcccaaagtagctgggactgcaggtgcacaccaccacgcccagctaatttttggattttttgtagaaacggttttgccatgttgcccaggctgctgatctggaacctttggcttttgttttgttttgtttttgttttttgagacagggtctcactctgttgcccaggctggagtgcagtggcacgatcttggctcactgcaacctctgcctcccgggctcaagtgattctcccgcctcagtctcccaagtagctggggttacaggtgcacgccaccacgcctggctaatttttttgtaatttttgtagagacggggtttcactgtgttgcccaggctggtctcgagctcctgagctcaagcgatccacccgcccatgcctcccagagtgctgggattacaggcgtgagccactgcacccagccctcttagccattttgttaacctcatttcccacctctggaggtggtaggggcttcccaagaagatcacttggacctcttcaagtatggtggcaatattgctgggctgttggagagacttctgttatagaggctcccctcttgtgtttttcctcaaaggcaaggagtcatttttggtcacatgaggacaaagagaccagaccagtagtgcattctgttttgcatgggaattgtcaaggctctttcagttttaactgaaacccaactcaaactggcctaagtcaaaaacgaatttattcatctatgtaactgaaaagagtgggccacaagggggaggcttcaggctagctgcatctaggttttaaatcatgtgaacagatctccctttccccctcccccatctcttgactttgctgtcatctgttagtttcattctgaagcaggcttccaccgtgaaatagaagaggtggcaactggtgacatcatgagacgatgtgtaatctgagcaaccctaaccaagaacttattttccttagtagttccagcaaaaatccagagaggactatccttggccaggctttaccccatgtccacttctggagccaagaaagacagttccttctccaaggggaacccagggtgttgatactagaagatggaaatggatacagtaagatgctgccacagtgagatgcctcacccaggtctccctctgtcacttcagccaagcacatgggatagaaagtagcaggcggcctctggccctttaatggaagagggccatccagtcctctccagttaacatctagaccgaacacaaagcatccttctctcatccagaagacataggaaccctaccttcagggatgatttttttttaacagtgaaatcttaaaagtaactgtttcactaaagcctccagtatttactgaagactgtcagaatcatcctccatcactagatcttctccaccagtcatgttccctgagcagtggggtggcttgaaggtataaaccagagaggcccaagggagggatagttagcagacttctggtctttttctagtttgtgctcttctgttccaaggaccacaggtatgtcttcttctgtgtagttgttcactattgtttcaatgtgattcgtttcccacatttgaaaatagggggggattttactttaaaattcagatatctggctcctctttaggggaaaaaaaaaaaaaaaaaaacctaagacgtaacaatactggacccacattccttcatggtagcagttgataagaggtggatagtgacttctcccttttgaccgggtgtggactttccaactcaccatagtcccagttggcctgctttgttcaaagcctggccttgtaagcatcatgtttgagaccctattatgtccgaaagctttgcttctatcgtttggcctggggggaaaagctggattaatgtttagtcagcagcttattgggtgggtggagggggggaacagtgctgttgcttaggaaaagtaacaacccagtaaaagaatttatgggaaagagtgtgcacaactttggtctgtttgtggatttggtcgtttttttgctgtaaatgctgttggtatatcaaacctcctgtcacaaatgttccctctgaaatagtaacatgtccttctatcttatgagttgccacccagtgaaggaatccctcccactcccgagggatgttcatccagcctccgcttgaccacttccagcagccagggagcttattacctcctcacatggcagccagttccattcttggacagatgcgttattttaaaattcttccttatgttgaagcagctgctgcctctttgggactgaaagccacaaaatgctggagctgggaaggaaaaccgatttttttaggcgcgtgagctaccactcatccaccctgcatccagggcaaacattgataattaatcacagcactctttctcactgagtcaggaagtatgctgccttaaaattgtttttaattaaattcttttttaaaaattacaaaagtaatatgtattcacttgcaactagtgaagtagtacaaagttatataaagatagtgttaataatccccctgtttctccaagatagtgttagcagccgagggtgtattcttctatacatttatacacatatagacataaatattcatatataagatatataaggggttttgtatgtggcttttttttaatttaaaaaatggcattatattgtacatattactgtgtagcttatggacacccctccaagtagttacagatcaaacattgtatatagctttgtttttttgttttcttgttttctttttgagatggaatcccgctctgtcacccaggctggagtgcagtggcataatctcggctcactgcagcctccacctcccgggttcaagcgtttctcctgcctcagcttcccaagtagctcggactacaggcgcccgccaccacacccggctaatttttatatttttagtagagatggagtttcgccatgttggccaggctggtctcaaactcctgacctcaagtgatctgcctgcctcagcctcccaaagtgctagaattataggagtgagccaccacacctggccagattaggcatgtttttaatagatacgttatatcatacaatgtgggatctgccccagtttattaatcattccccattaatggatattcccattcatttcttcaggattcttctcatcgcagtgctccaggcagccactaccaatcgattggagttagcctgtgaggtaaaacctatttgtcatgtctcacccagtcccgctccttatcctacattctagagaagagaacagactagctccgtgatcaaagtgaatcagtggcttgggcaggactagaactgaattttcttgactttcagcatttcctctatcccatgttgtcactcccttggagtcatctaccctgcttttctcctctagagtaaaagaacaaatataatttcttttctgcgtgctacctcttcagatattcaaagtcagttatgccattccccttgagtcttctcttccccagaggaaaatctcagtgccttcaatttttttttcttaaaacaaggttttcaaatccctttaccatcctatgagctgttccttctatcttcttcccccctagggctatagaaatcccaagtgtggcttccacattcaccttctatagctatttatttattcaataaatatatattgagcaccttctacgtgccaggcactgttgtaggcactggctgactgtatggcttgcgttttggtcagtagagagaaacaaataagatgatacctgagagtgccaaattatataggaatgaaatagtgttaatataattggaggagtaactcctgagattggatggtcagggaagctctctctgaagaaatgacaatgagctgagacctgaatgacaggagccagcttctaggggaagacagttccactgaataagaaataatttggtacaagatgaggttggagtggccacaggagtcctatagggctcggtagttcaagataagatgtttggaatttgtttaaaatttttttttctttttttctgaggcagagtttccctgtcacccaggctggagtgcagtggcatgatctcagctcactgcaacctccgcctcccagcttcaagcgattatcgtccctcagccccccaagtcactgggattacaggcgtgcagtagcacgcccggctaatttttgtatttttagtagagacgggatttcgccactttggccagtctgatcttgaactcctgacctcaagtgatccacctgccttagcctcccaaagtgctgggattacaggtgagagccaccatgcttgaccttatttagattttatttaagtgcaatgggaagtcattggagaattttaggccagggaggtgacatctgatttcccctttaaaaaaaattgctggacgcttgtttaacttggagcaaggtttcattttccctcatacctttcctgcttcttacatccaaagggattggcaaccaggccagttcagtctgtttaggggtcccacaggggatctgtgaggcaagtcacagctgttgcctaatgcaccccacagccctcctcagcaagcgcacggaagttcagagagatgtgagtagctcccttagacctgagcccagtaggttcaatgggtctttgtatgaagttctcagtccggggaaccttagtcctttggcagccagagggggatggagctgaatgtggtttgaggatagagccaagggcactggttgcaagagagacagatggaagaaatgttgagtggagatctggagctcgagacacttagaaaaagccttcggagtggtgtccagaaaccaaccacctgaaaaataggtctgttgtttgcccagttgaaataacttttctttagttcctgcctaagaggggaatttggacactttgtagcttgtgagtttttgacttttgatctgtccccttcccctcaggttggcattttctttgcttccaggaggagcctgagacaagctggcatctctggaagtcggggacttcccaaccagagagtttaggtttggagtcttcaggggaattaagagggcagggagcgattcacctcagaatagagatgggtaaaatctgataaatcagagttgtgccttttccagagtcagggaagctgggttagagagggtgagattccctcagcctgttggtgatctttgaaaagccctttgtccatgcccacacctgatagatacccagccagttactaatcagatggctggctgcatacctgagatctccaccagggtcactacccgaccatccatcctctacccagcattgtgggtctagcttgaagtaatttaaagagcccttggagtcctatcagtaggttaggagtcacactgcccagctctcagagaaggtggccagaaaccagcaaggtcagagatgtgctgtgcttagtcatgtcaccttgggccagatcgccatcaattcatatcttttctcataatttgcagcctactatttcccacttctgaaaaatttttccaatatattttctgtgttaaatccgcttcctttgacactatgacagccaggtgtgagggccaacatctccttggtctctgggataggcatctaagtcccagtcacgccttttctctggatctgaagatttgggtgaaagtagctttaatatctggtgttggcttcatgtttcttccaggagctcagcagagcaagtaccctgaaagagaaaggcatgaggccttcatgccccctcaacccacactcaccaggcaagtttcagccccttctttctgtttgacccctttgcttcctttttcaggaaactggagaggcgtggctggaccaagacctccccccatgtgagcaggcttcctcctcccccaacaaccgttgccaccacgcccagaaacgtccttaagccctggccctcaggggaaaggtaacaggaggccagagccgggaccatgtgacggcgctggccctcgccaccgccgtcccccgaccctggccccaggcccggcaccatgatgttccgagaccaggtgggcatcctcgctggctggttcaaaggctggaatgagtgtgagcagacagtggccctcctgtcacttctgaaacgggtcacccgtacccaggcccgcttcctgcagctctgcctggagcactcactggcggactgcaatgacatccacctgctggagtcggaggccaacagtgctggtgagtttccacccttagagatgggagcacagcaggagggagacctggaacagatgtcacatggctaagaaggtcaacccaacaatgggactaaaaaacgtgggttctaggcttggtgggtggggagttccttaccttctaagttgtcatcatgggtcttctgggactgtgttgccataaatcctcaggcatggtatggtggacttatgggagaaggcaatgcaaactggaaactccccataacaggaagatcatgtagagtggcttatgtgggctgctgaaaggaacagactaaagtcattatgaaaggcgtatagaaggtgagcagtaattaatttcttaagcttcaggatatcagggctaggagggaatttgagaactcttccaaaattcatgtcatcctatactattctttaccctcaaaggtaggttggacttaaagcataagcagcttccagaaagttttgaatttagatacagttcatcctgtcagttccctaagtacttattaggcactctgtgtcctgtgagattggcattgggatgggtgagccaggcttctcttaagacctgtcccttaggccccagttgtagacaggagtcaggctagaatcaggggctactgctgaagctactctagctgtctgggcctccacagggctggatggagagctgttggccccagtgacagatgggagagatggaggccaaagaagagggagggtagtggatacccgaaagctagctgggaagggcatcaaggggctccatgcagtttgtccaaattagtcaccctaactctttgcaccttcttcttcagaataatagttcatattgagcctttacagcaagccaagtactgtctttacttgtatattaactttaaaagcagtgttcttggccagatgcagtggctcacgcctgtaatcccagcactttaggaggctgaggcaggcagatcacctgaggtcgggagttcgagaccagcctggctaacgtggcaaaaccccgtgtctattaaaagtacaaaaattagctgggcatggtggcaggtgcctgtaatcccagctactcgggaggctgaggcaagagaatcgcttgaacccgggaggcggaggttgcagtgagccaaaatcgtgccattgcactccagcctgggctatgagagcgaaactctatctcaaacaaacaaacaaaaaaagcagtgttcttacgtggctctcaagtcagactgtctaagtttaaatcccagttctgttacttgccatataaccaagtaacttaacctctctgtgcctcactttcctgcgcgccaccacgcctggctaatttttgtatgtttagtagagacggggcttcaccatgttggtgagtctggtctcaaactcctgacctcatgatctgcccacctcagcctcccaaagtgctgggattacaggcatgagccaccgcacccagccagtttcctcatcttaaattcaacatgatatcctgagaagtatgtaacctcagtaaaaaaaaaaaaagaaaaggaaagaaaaaagatgataattatatctaccttctagggtagttgtgaggattcagtgaattaacacgtgtggcttcctacatgcctgacatgtagtaaacaataactgtcagttgttaattgtcaataactcacttagtcctcacaacaaccccatgaggtaggtcctgtcattagccccattttacaagtcaggaaacaagcatggactgctaggattgggttttggggagccacacagctgcctggcctccctcatctccccaggcccacctgccttagcaacagtcacccttattttactgagtttttgtgtggaagtcacagaagcagcatgattgtagcgggagacggttactcaggccaggggtcacatcagcttagttcctagtctggcagtaagttcttagtcctagacaaagagcaataagaacccagctcagctgcagcaggctcggagctcagccatttctcacccctgccacactccccaccactctaacactaaaggcaggagttctgtttgtgatatgactctgcctttatagtgggggctcctgtggggcaggccagtgtcttacacagcttcgtcacacatccccactgtcccatcctgagcaggcagttggattacctctgggtgccactcttagctgtatatcagaatcaccagtagtacttagtaatttcagtgcttttagtttttgcttttgttttcagaacttgcagtaaaatcagatagtacaaaaggtgaaagtgaggtttttcttccagacttcacgttctcatttccttatgttttatgagataaattccctgcatatatgaatgcatatatattttccttccaactttgtcattgttttgtcttaatacatatggccaaacatgcatattaaccagtttggttttttcacttaccaatatgatttgaagatcattccgtattcagcacatacgtctgtttctcgttaagtatttatttacacctcacaacaactctgtactcccctgttactcccccattttacagaggagactgtaggtctggagatattaaatgacttgctgtgggtcacacaattgataagaggtagagttcaaatttgacttcagagttctttagagctcttgaccaatagactcttccacatggtacatgtggtcttcatcttacaaacagtgatgtaatgagtaccctttaaacatctctaggatgaactcctcagattctgcagaactgctagtttaaaggtgtatgcaattaaaatatttgttctccaggccaggcgcggtggctcaagcctgtaatcccagcactttgggaggccgaggcaggcggatcacgaggtcaggagatcgagaccatcctggctaacacggtgaaaccccgtctctactaaaaatacaaaaaaattagccgggcgtcgtggcgggtgcctgtagtcctagctactcgggaggctgaggcaggagaatggtgtcaacccgggaggcggagcttgcagtgagccaagattgtaccactgcactccagcctgggcgacagagcaagactccgtctcaaaaaaaaaaaaataaaaaaataaaataaaatatttgttctcaccacattgcccttgaaagacatgctgcattttatacaaataacctgaggcccgttcccagatggtttgcagtgggatattggtggtaatgcctagccagggttgagaagtgctgtgaaatgaattgaatgatgaatgaatatatgaatcaaggtttttatccatagccccatatcagatggtgagaataacaagctggtacttaaatgggtggagaggaaaggaaaacttagaatgagggaaggccatggtgtgttccagagtcagcaggaagcctgccaggactggagcaaagcatgacttgaaagagaagtgatcacagaggtaaattctggtagagtcttgaatgcctgttttctagtagacctgagggctctaagactaagaagcaggtgcctcctgtttcactcctaccctcaagtagaaccccacctgccttatttgtaaaggaaggtgctactttctgggcctggagacctgcctcaaagaaggagctgttcatactcttgtttctcctctggttattatggccttcccattccctggtgtttctcaaacttgcatcatcatcagaatcactggggttaggtgactgttacaatccagatttctgccccccatagacctactaaatcagaatcctgagggtatgggcctgggaacgagtacccaggttcttctgctcaccaggcagtgtgagaggtgatgccctgctggatgattcatttgttgtgagacatgagacacccaagagttgtagatccagctctccactaacacctcttgtgacctgggtcagtcctgcctgaccctctcgggcctcaggatccccatttggacagtgagggggttgttctggtactttccaggtacttcttgggctctgaaataatgtgccaaagaagacagagccacagccaagcatactactttcttttgggagaggcccagcacattattctagggcaagagttcttaatatttagcgggatggaccagttagaaaatcttcccctcctccccaccctccccaaaaagatgcacacctactccacaaaccaactcttgagttcagttggttcactagtccccagttaagagttccctggccgggcgccatggctcacacctgtaatcccagcactttgggaggccgaggcaggcggatcatgaggtcaggagattgagaccatcctggctaaaatggtgaaaccccgtctctactaaaaatacaaaaaattagccagacgtggtagtgggtacctgtagtcccagctacttgggaggctgaggcaggagaatggtgtgaacccaggaggcggagtttgcagtgagccgagattgcgccactgtactccagcctgggcaacagagtgagactccatctaaaaaaaaaagagttgcctgtcttcccggccgggcgcggtggctcacgcctgtaatcccagcactttcggaggccgaggtgggcggatcacgaggtcaggagatggagaccatcctggctaacacggtgaaaccccatctctactaaaaatacaaaaaaattaaccggacatggtggtgggcgcctgtagtcccagctactcaggaggctgaggcaggagaatggcgtgaacccaggaggcacaggagcttgcaatgatccgagatcgcaccactgcactccagcctgggcgacagagccagactccgtctcaaagaaaaaaaaaagttgcctgtctccaagcccttctttagcttggtcccttcaaacctggagagctgaacagtgaggtagatcccctgcttttttgtgggttgtatctccatgtcccaccgaaccaaccttagtacttcctccagttctccagggagaccttgggtgtgggtcagagctgcccagttgtctgcttcctgctcagatagatcaggtagcacagagctgacctaggtgaatatgtccctagctttgtgttagaatcccccagggcctttctaaaaataatgtgaagcccaggtcctatccctggagatttaaagctccctggttgactcttgggtgcacccagtggagaaccacttgtcttgatgctgacgctgattttgggtaggcccgggaagctggtgaggatactgttgtgtgacctactagaagtggggagtcggggcttatagctgtggaaagcctggcctaggtcatcgcttcctctcaggcagctgggaaggtatagggaagtcctccagcacaggcagccagcatcagtttcatggaagtaggacatgaggcgcaacacctagaaacagaaaagcaatattccaagggtctctggaacagggaagaagaggtcccaggttaccccttgttgtaatccctgtttgttctccaggtgctgtcttccctgcctctttggagctagaacaataaccctggtcctctcctttcctctgatgctgacttggaccagaaggctgttcctatggacaggaggaaggagactaggggggtcaggggagctgaattccacttccctccactgtcctgtagcttcctgggagacatttcctgcattttcttcccacctcctattctgagtcagtccccatatctagcaggtttaaactcctccctctctggctcattcagtctgggtggggaaactgaggtcaggaggggcaatggcaagtgagtcatcagagctcagccctgtcctccaccctccactttcaggctctgcttgacagttcatcaaacaaaaatgtgagccccctgccctcccctgtgtccatgtgagcaggggtgaggcagagaaggtcatgtttagagccaaaccctagcccctctgactggtgcctgaggctactccaattgttgcaccaggccagtacataaaaatgggtttgctcttagagcagtctcgattggtgcctgtaatttgccaggacccagggtcatgacctacttagctctagtcacctggccagctctgccctgctgccactatagccagggaggacatttatacgcacagcattcctcaacctctccatgtttgcagagtccaagtttgcagcttggtgagaagcagccgttggtgtcttggcattccccagccccttcccccatctgcccacctccagaatttcatcattgcttgttgtacttctagctccaaggaatcagagatgtgtctgtttttggtaaataactgtatgaaattccccacccctgtcgggaatcttaaggggaaggcccagatgtgcttttgtacatgaactgttcccaccagccctgaaacagcatgggctctagattcaacgaggagcaacaacaataatagttaaaatgtacttgagcacttaccacatgccagacgctttgcatgattgtctcattgactctttacaacaatcctgtgaggtagaggccttacagtccccatttacagaagagaccaaggatcagagaggttaaaggactggcccacaatgatattgagttaggtcatggaggcagagctagattttgaatccagcaagtttgcctgttgaacttgtgctcttacttagtatactctgctaggacctgagacagagtacaccactaccttccaggggaccatctgggttcaattgtgcaggtattcgttgggcctctgctgtgcctccactctgggccaggctttttctgatctgggcaggaaactagaagttccatccccacccattatttacagccccagctgggctcaccccaaggggcctgaggctgcacaaattacttgggccagttccagtgctcactgatgcttctcagtcatgggaggcccgccctccccaccaccaccacacagacacatgaacacacatttccccagaatcagcctccatttgtccaaaaccactctcccctttctcggcagcagaacaaggtcctgcattgagcccaacccttggggctgttctgtcatgtcccctggcagtaccagagaagctgtgtcccttagccctggggtcctggcagtactctggagtggggaaaggactagacaaggcttctctctgtcccagatgcctctggctatgctgcaaggcctaaacaacagcgattgagaatgtcagggtagggctggaggggcaggctgactcgactactggagaagagaggaaaacacccgtcactgagccacagactgaatgtttactatgagtacactctgtcagatgcttttcatgcatcatctccctacatcttctcagcagctttataatccttactttacagaggaggaagcatactgcccaggccactgtgtgtttttgactggggtgcatatccttgacttatttttatttttttttattttcattcttgactttctgtccctaatgggaatcactgtctttcttctttctcatcaagaactgaaaactacaggactaagttatcaaacagggtaccacagagttcttatcgtttgatccagtgccaggtggagttgggagggcaggaaagacaaaagttctgtgacttcagtgaggccttttctgccttggaaaatgatctttagatgtggagatggcctgaaggacagcttcataatcttggcagtcggttcaagtgaagacagacaagggaatgaggtttcctagctttgagtggcagatgctgaaggggatctggaaatccagggaagaagagagacttgggattggagagataaaaggttgtgggtaaaaagttcccccctggctgggcgcagtggctcacacctggaatcccagcactttgggaggctgaggcaagtggatcacgaggtcaggagatcgagaccatcctggctaacacggtgaaaccccatctctactaaaaatacaaaaaaaaataaattagccgggtgtggtggcgggcgtgtgtagtcccagctactcaggaggctgaggcaggagaatggtgtgaacccaggaggcagagcttgcagtgagccgagatcgtgccaccgcactccagcctgggtgacagagcgagactccgtaaaaaaaaaaaaaaaaaaaagttcctccctgccggacaccatggctcacacctgcaatcccagcactttgggaggccgaggcaggtggatcacctgagtttagaagcttgatactagcatggccaatatggcaaaagcccgtctctactcaaaatataaaaattagccaggtgtggtggcgtgcgcctgtaatcccagctactggtgggggctgaggcaggagaattgcttgaatccaggaggtggaggttgcagtgaaccgagatcatgccactgcactccaacttgaacaacagagcaagcctccatgtcaaaaaaaaaaaatggaggcacacagagcctggattcagatctcagctgtgtcgcttaatgggctctgtcacttagggtgtgtgacctcaccttcccaaatctgttttctcacctgcaagatgagcacaccaaaacaggattaaaacagggatgaaaagcaatcatttttagcatagtgtctggcacatagtaaatgctcaataaacagtatccttcattctgaatgaaagtgccatatgttattgctattgtcagtagtagcaacagcaatagtggtattggttctactattaattttaaccaatgctgtagacatagtatgagttgatgactttgaatgaatggatttaacaggtgttcccttggctgggcacagtggctcatgcctgtaatcttagcactttgggaggctgaggtgggcaagtcatttgagagcaggaatttgagactagcttggccaacatagtgaaaaaagtaacaggcaggacacggtggctaacgcctataatcccagcactttgggaggaaaggtaggtggatcacctgaggtcaggagttccagaccagtctgggcaacatggttaaacgccccctccactaaaaatataaaaattagccgggtgtcatggtatgtggctgtaatcgcagctactcaggagactgaggcaggagaatcgcttgaaccccagaggcagaggttccagtgagccgagatcgtgccactgcactccagcctgggcaacaaagtgagactccatcaaaaaaaaatagccaggcatggtggtgcacgcctgtaatcccagctacttgggaggccgaggcaggagaatcactttaacccggaggcggaggttgcagtgagctgagatcactgcactccagcctgggcaatagagcgagactccatctcagaaaaatagaaaacaaaaactaacaaacaggtgttctctcttggaagcttagagcaaagagccccaggccaagaaaatgcacagtctttatagccaggagttaggaactgtgtgagattcattttcctaaggctacaaacttaagcagaattaggagtgtatgtgaattctaggccacagagttctaaggggatcattaagagaaatagggctacagacagggcatttctgagtttgtatgcaaggccaggtgtccatccttcagtgtgggcagaggagaccagaagtccatggaactttttttttaagtcaatcctgaagcatgctagatgtccttggaatcgtaaaggcctaaggaacttgggttgaaagaccctcagatgtctaggtttccaagactttccttataggtgcttattcctagcctcttggtttcctgggcccagagatttggcttgtgcctttagaatctctgtgtgtatctgaaaggagggagacacagtgagatataataaccacaatactagtaaaagcagctagtgtttactgaggacttactctatgctgtggcctcacataattcatagcagccatgccaggtaggaatgattctgggctccactttacagatagagaaaatagagctcagtgaagtgatcacacttgcccagagtcacatggccagtaagtggtggtaaagggacatatgccacatctctgcctattccttttcatcacccactcctttggggtcctagctctgtctggttagagccagctcctttgcccatttccaagacctcaccattagcacatctctcagaactcctttgtgagatatttgtaagtcatcaccttggctacagatgtgagctcagttgcccaagggtgagagcgtagttggcctcagacctaaatctttgtctcttttcccaagtattggtattttttgtccctctccttgtcctgtcagcattatctccatcttccaccctgtttagctagtcacagaagtgctaatgaggttttttttttctttttcttttttttttttttttttttgagacggagtctcactttgcccccaggctggagtgcagtggcgcgatctcggctcactgcaacctccacctcccgagttcaagtgattctcctgcctcagcctcccaagtagctggaattacaggcatccaccaccatgcccggttaatttttgtatttttagtagagacaggctttcaccatgtcggccaggctggtctccagctcctgacctcaggtgatccacctgcctcagcctcccagagtgctgggattacaggcgtgagccaccacgcccagtgctaataaggtctttgagggggagagtcagacttgtaacagttcctacccaagccttctttgatgtggccagcctggggccatattcttagggacctcccttgtgggttgaaaggggaaacctgaggccgggcgcagtggctcacgcctgtaatcccagcactttgggaggctgaggcgggtggatcacgaggtcaggagatcgagaccatcttggctaatgcggtgaaaccctgtctctactaaaaatacaaaaaataagctgggcgtggtggtgggcgcctgtagtcccagctactcgggaggctgaggcagtagaatggcatgaactcagaaggtggagcttgcagtgagccaagatcgcgccactgcactccagcctgggcgacagagcgagactccgcctcaaaaaaaaagaaaagggaaacctggcttatctccacagggtagactcaggtcctcacacagtgggatagaaaggagaggtcaagatgaccatgacatggaacagccagggaatgcttcctggaggaaggtagtaagttaggccatctacaaaagagaatttgtataggaggaaggaggttgttgcgggccaaaaccttgaatctcagccaaggtgtggagcttggataaatacatactgtggagagaaccccaaggaagatggggagatatcctgagctgagtctttatctggaggaatgggagatggagggtgccctggaaatgaaggtgatgttaggctaggagttcttggacttgagtctgttggtgcttgctggttgccattataaactcctggtcaggaacatgacatcctgttgtgatttaggaagataaatgcatctggatgtatgggatcgattggaaggggagaatctagaagcagagagaccagttaaaaaacaatagcaagcatttattatgtcgccaaaccactttgtgttctttgctagctcattgaatctcaaagcaacactgtgaattgggtactgtaattatctccaaaatttcgcagataatttagtgctccatgaggttcaaggtagcttaccaagatctagctagtaagctggggtgtctagaccatctgattccagagcccaagcttttaactaccatataccactgccttctccattcaggaaggagactgctttttggcaggggaaatggcatagaggccatgaagaatggaggaaggagtcatggagataaagcatgagagcaggcctggggacaggagttgttcagattccagagtagcaagtttggctgattgggaggcactgcaggtttctgagaacaggagtgatagaacaaagaaaaattactctacaccagctgtggtgggcacatgactgtagtaccagctacttgggaggctgaggcaagaggattgcctgagtccaggagttctgggctatagtgtgctatgctgattgggtgtctgcactaagtgtggccccagtatggtgacctcctaggagtgggggaccaccaggttgcctaaggaggggtgaactggcccagtttggaaatggagcaggtcaaaactcccgtgctgatcaatagtgggattgcacttgtgaatagccactgcactgcagcctgggcaacatagtgagaccccatctcttaaaaaaaataagacaaaaattactccagaggcagggtcagtgtgtttgatctcacctatatgagggataagtttgggagttatgaaaagaaaatcgttatgaaaagaagattggagctgagggaataggccataggcagtgctctcaggtgaataggagtaccccaccctggctctcctgatatttcttcttatcccttctgtagccatcgtcagccagtggcagcaggagtccaaagagaaggtggtgtccctcctgctgtcccaccttcccctgcttcagccaggcaacacagaggccaagtcggagtacatgaggctactgcagaaagtgctggcctactcaatcgagagcaatgctttcatcgaggagagtcgccagctgctttcctatgccctcatccacccagccaccacactggaggaccgcaacgcactggccctctggctgagccacctggaagagcggttggctagtggcttccgctcccggccagagccctcctaccattcacgtcaaggctcagatgagtgggggggccctgcagagctaggccctggggaggcagggccaggctggcaggacaagccaccccgggaaaatggacacgtgcccttccacccatccagctcagtgccgccagccatcaacagtattgggagcaatgcaaacacaggtaagtggcgggggtgtcccagaaggccatgcctacttgaaaaaggttggactaggctcagtgagagctctctcgctctgtggcattagacaagtcacataagctgtaggcctcaactttatgaggcaatgcagaggctgtgaactggctttcccagagctgaatctgacctacagacatgtcttattgaacccatactttggtttggttttattttgttgtgttgggtttttaaataaatgtgagtggtacaaagaatcaagaatttttccctaaaaatgagatttccagcctttcttgagaagtcaaaagatctagcaactcaacaagatctgttttcctagtggcagcaataatatagagcttaatgttgagcatgccctttagaccctgcacaagtgccctagtctgcctctgctcccaccaacccccctttgggcatttctgatatatacctggcctctaagggcatcaggctatgacgcttgatggaggtgtgcataccatcatctgagatcccttccagttcagacaacattatggattttatgtatctggcctcactttacagctttgtttctgagaacactgtctgtataagacaaaactcatgctgcaaggtatttgtaatagtaggtagcatttttcagcattgactatgctaggtactcttttatagacacttttcaggtatgatctcagtccgcatcacaaccgtatcattagccctattcaacagatgaggacatcgggactcagaggtgaagtgatgtgttcaaagtcacacgtagaacaagtggtggaacagacccaaccagtctgatggcagagcctgcctctgaccactacactgtcctgccaactaagcaggtttgaaagagctctcttagtaaaagccctgcaggcgggagtgagcagaagttgttggtatcccagtgactttttgaaatgcacaggataagggagggtggattttccaagccatggtaaggcagcatgacctgacccagggtgagggagagggttcatgatgtaaacctcagagtagctagtcaccttcagcaggcactggtttaaagcaagacaagagagagtgacagtgaaatgtcacatgtgtcagtgggtgggggtaacctcgggtccctaatgccccgctgtctggtacctggtgctcatcagttattccttgagcctgtttttcccccagttagtgtggctattctggtccatctgcctccctcccagttgctggtgagaacctgggaagatagagggatagaagggcagtttcaggaaacttagcaacctgaggtgtcttggacctcattttccagtcatggagcatcacagttccaggatgggaggatgtattaataatgatcattctaggcaaaaaatattgagtgctagtccgggcatggtggctcacgcctgtaatcccagcactttgggaggccgaggcaggcagatcacctgaggtcaggagttcgagaccagcctgaccaacatggtgaaacctcatctctactaaaaatataaaaattagctgggtatggtggtgcatgcctataattccagttactcggggggctgaggcaggaaggtcgcttgaacccaggaggtggaggtggcagtgagccgagatcttgccattgcattccagccagggcaacagagcgagaccccatctcaaaaaaaaaaaaacaaaaacacacatcgagtgcttagtctttactaggagctattctaagaactttatacatataaactcaaggtttaaagccaggcattctgactatagacttcatactctgaactactatgctacactacctccaccaaaaagtacctctcctggagatgctcatccctcaccaaggggaggggtcacccaggcagggtgcctataaatttctttgtcttcataccttttgtgctccccatcatgggtaccccagcagccattaaaggatgaagattgaacaatgttgataggggtttggaccaaaagaggaaaaggaattgggcattccaagtagaaggcacagcatgaaataagcacggggtggataattagaggggacagtatacagacagatctggctggggtggattcgaatgagtaataacagtagcagagacttgtgcttaccgtgtgcctatccctctgctaaggacttcatgcagaaatggaggcagagaggtgaatgaagtgacttgcccaagatcacacagaggcgacagagtcagagtcaggatttgaactcaggcctgtctttaccctcagacctcagtgtgtgaaggctacattctggggggcgttgaaggacaggagaagcttttggattccaggcagttgcaggaaacaggaaatcattaaaatatttttgagtggggagcaaggattggcctttgagggcaggcagcttgggtttggggtgctgccaagaacagatcaggatttcttggagagtgcaaggccctggatctctggccggcattcttgtttttgtcattctcatgctgtggccagcctccaccccagtgcggagccaagcagggctcctcaggaactgcacgatcattccagtcagggtaatttcctgcctctcagcctctcctgcctacttcttggctgagaagggagaaagaaggaggccagagacaccaaaacaggcaaaaaggcctgtcttgaggattccccagtcccccagggcccagagtgtgccatgttccccaagagtgctgagtggggacagaagccagggctgagggagtctagaggctgaagaactcctgggaagaggaccctggacactctggggtagggcagaaactggtattaagggtgggccactgccttgccctgtcccttaggtgacttcctagccaggagcattagtattgtcacagctgagggaagatgctctggggcctgcaccaggctagccctccttcctgggctgggtgtcactgtagcactggcaggaaccccagcctttccatcagaaacaaggcttgggctctgtctcagcctgtcaactcccgtgggaactggggcaaagggcttcagctccctgggccttgatgtcctcacctacccagggtgaggctcgttggctttgtttcatttctttttgtctaggctgacttggggtacttctggatgccataggtggagctcagaggccctcttagcacccttttgtcctttatgaaacttcgttggaaggacttctgtgtgtcatgccctgtgcctgatcatgggattgcagaagtaattggactgggctgccattctccatggacccacagtccagtgcaagagggaggctagtgaggagggcagcaagcaagagggaggctagtgaggagggcagcaagcgccaggcctgaggcagcagcagaggggtacatgaccgaggcatgaagggagaagtggctgatggagaagagttggcgaggtgagcgaggcagaggaaaaagcacagataaaggtctgggagctcatgggaacctgccctgtcttgggagtggttaaaaatcaagttggaggccaggcatggtggctcacacctgtaatctcagcactttgggaggccaaggcaggcggatcacctgaggtcgggagttcaagaccagcctaagcaacatggagaaacccccgtctctactaaaaaaatacaaaattagccaggcgtggtggtgggtgcctgtaatgccagctactcaggaggctgaggcaggagaattgcttgaacccgggaggcagaggttgcagtgagccgagattgtgccactgcactccaggctaggccacaagagtgaaattccatctctaaaaaatatatatatatatgaccaggcacaggtggcttacgcctgtaatcccagcactttgggaggccaaggcaggtggatcacctgaggtcaggagtttgagaccagcctgaccaatatagtgaaaccctgtctctactaaaaatacgaaaaacattagctgggcatggtgttggccacccgtagtcccagctactcgggaggctgaggcaggagaatcgcttgaacccaggaggtggaggttgcagtgagccaagattgcaccaccgcactcggcgacagagcaaaactccatctcaaaaaaaaaaatcaagttggattcctttgccaacctcagacttgggatggacagagggtatggagcatccttcagaagaggacctgggatcaccctgagtcaccaggcctcatgagtggccagtttgggctcactgcagaaaaaaaatgggaggtagtgaggccccataacagggttgttgaggaagcagcttacgtacttcattcattacaagatataatgatgtttaagatgggacaggtttctgctgtcacaggtcttctattctagcagggggtgtagttaataagtaaacaggctgggcgcagtggctcacgcctgtaatcccagcactttaggaggctgaggtgggcggatcacgaggtcaggagattgagaccatcctggccaatgtggtgaaaccccgcctctactaaaatacaaaaaaattagctgagcatggtggcaggcatctgtagtcccagctactcgggaggctgaggcaggggaattgcttgaacccaggaggcagaggttgcagtgagcccagatcgtgccactgcactctggcctagtgacagagcaagactccatctcaaaaaagtaaataaatttttaaaaaaataaacaaataacttgataatttcaggttgtgatgggtgctgtaagaaagacaagacagtaatgtgatagagtgacggattggggcagcagaggtgggcagtgacttcagattaagggttcagggtaggcctcagaggaggcgacacttgagatgagacttgagggagccaaccgctgagatcaagaaggtaggaagaaagagcaagtccagaagtcctgaggctggaacaaccttgagtgtttcaggaacaaaggggagtttgggaggaggcaaaggctagagaggcatgaaccaagtggtgggttgtgggagaggaacaggggccaggtcctgcatggccttttaggcatgtggaagcatttgtattttgttcccactatgaaaggaagtcacagggatttgagcaggagtcaggctcggtcagatttgcatttttagaaggacctttatggctgttgtgaggggcgtggactgtaggaggcaagagtgaaggcaggaaaccaatgaggaggctgtggcagtaattcctgccaggggtgctggtggcttgagccagcggaactggagaaattcaggaaagtggctgacagcttgctgatgggttgggtgttggaggtaagagaatgaggtatatctggtaggcagttacccttggaccccaggtcccttcctcttggcaggttatggggccaaactgccatcctggcactgacggcagggggatggtctcctgtggttgggtccccaggtctaatattttgcttttctcccactctggccaggtctcccctgccaaatccaccctagcccactgaagcgctccatgtcactcatccctacaagcccccaggtccctggtgagtggccgagtccagaggagcttggggcccgggctgcttttaccacgcccgatcacgcacctctctcgccccagagcagcgtggcctcctctggcagtgagcagacagaggagcagggctccagccggaacaccttccaggaggatggcagtggcatgaaaggtacattggggacagcagcaccaggacccttttccaggggcttctgcagagcttagaggacagaaaggagcttgtagctgacacctgcttacccctctgaggaggggacatgtctgaggggagtagatagtccctgcttttagggctcaggactaagcagagagaccccacatctaccctaacaagttctagtctgactgggaaggagccccctgtcttcacacaccccagtctgacaaggaagccaggacacagctaagtgatggaacagaggttccagcaagagttttggagcaatcagtgaggtcatcctggtatacatccagcctagcagcttagaagggtcagatgtccttcccagggaaggctgcctgagggtctggctaggcagatgaagaaggagctgatggaaccttagctccccccaaccccctcccaattttttgcatcttttgaggcttcctgtgggtttatccccacaacttttcctttaccctggtaatctgggccaaactcctgacctttcactctccctcctttgccaaagatgtgccctcatggctcaagagcctccgtttgcacaagtatgcagccctcttctcacagatgagctacgaggagatgatgacactgactgagcagcacctggagtctcaggtgaagccaaggggaccatcagggaggtgctgggggcagcgctagtttggcatccttgcagcccaagcctcctctgtctccttgatctctatttgggtacccccaaatatctcagcctcacatctctagcttcctgtccccttctgcccttatcacagaacgtcaccaaaggtgcccgccacaagatagccctgagcatccagaagctgcgtgagagacagagcgtcctcaagtccctagagaaggtgaggacctggtttctgcatcttcaaggccagccagccacttggtggtaccagtagaccaaaggccctgagttggcctccagactcctcggatgtggcctccaaaattcccagccctagggacccagacttcagggaccacatgcaagccggcatcaaaaggctcacttgctggtggctaagagtctcccctccctgtctttcctggtttgtggttccaggatctctgtcttttgactctacaccttctctccccttttgcttttccatttcttactggtctttctggtagagcagagtgtctctgtctgtacaatctctctttccatttgattgtttctaaactcattttccttccacatctgattccgtttccttgccactgccttctgtttgtatttttccctgctcagtgtctaggtctgaatctctgattctatccttgttgggtccttgagactccaacattagactggcttttcgtgagttctgtgggacttcatcttaatgggaaagaggaaatgtgtacctatatgtttgtgggcttgcagtacccttacatgccttctctatgtgctggaacccagggtcctacccagccttctgcaagccctgtctgactctctgtgtagatactctctgtccctcattgtagggtctgcatgtgaccccagcctgtgtcctcccatccaggatgtgctggaaggcgggaacctacgaaacgctctgcaggagctgcagcagatcatcatcactcccatcaaggcctacagtgtcctccaggccaccgtggctgccgccaccaccacccctactgccaaggatggggccccgggggaaccaccgctgccaggtgctgagcctcccctagcccaccccggcacagacaaaggcaccgaggccaaggaccctccagctgtggagaactacccacctccaccagctccagctcccactgatggcagtgagcctgccccggctcccgtcgccgacggagacatccccagccagtttacacgggtgatgggcaaaggtgagaccagccacagcctagcaggaaatcctgaggcagaaagccaagtgaacccaagcaccagggatcaaatccaagttcgatggtgggagcagggctttgtaaagcctactggagactggaacactacagagagtagccaagacagggtgacaaggccccttgcccttgggcacgtctgggctgatggtggataacagcccttcccctcaaagcgtctccaggctgagcagaaatggggcagtgggtcagaagaaattccatgtagtaaagggtgagcagttgaggggagtccattgatttctctcagaggggaccaaagtccaggggatggggatggtgaaatttatcacagcttcagcctttcctaaagcagcatgatacagcagactttacacttggatccagatcagtctagatctggatctggacctgaggcaagtgactcaactctgagctttaggtttctaaggctaaaaatgtgtgtagtgacaagattgtgtcaggcactatgttgtatatcctcatgataacccaaataccatggctagcacttaatagttgatattcatccagcctgagtctcctgttccttcttgtgcacgagccagctggaggctggaacatggcagagggcatactaggggttaacctcctgccctttctcatgtccccccagtgtgcacccaactgctggtgtcccgaccagacgaggagaacatcaccagttacctccagctcatcgaaaagtgcctgactcatgaggtaaggccttccctagcatactcaaaaagggaaaggcggccaggcgtggtggttcacgcctgtagtcccagcacttcggccaccgaggcgggcggatcatgaggtcaggagatcgagaccatcctggctaacacagtgaaacccagtctttactaaaaatacaaaaaattagccgggcgtggtggcaggtgcctgcagtcccagctacgcgggaggctgaggcagaatggcgtgaacccggcaggtggagcttgtggtgagccaagatcgcgccactgcactccagcctggacgacagagtgagggaaagcctgccccatctttctcaagaccattgtgttgtatgtggcccatagggccttacctgacgtggcacatgccagcccttccagtcttgtatcttaccagtgttggctttagaggcttcttctcagaacccttgtacacactcttcctctctctctctcttttttttttttttaatagagacgaggtctcacactgttgccctggctggttttgaactgacctcaagtgatccttccacctcagcctcccaaagtgctgagattacaggcgtgacgattttcttttttagagatggagtattgctttattgcctaggctgatctcgaactcctggcctcaagcgatcccctgccctggcctcccaaagtactgggattataggcatgagcaaccatgcccagcccgtacatactcttttgtcagcaacagtaccctttcctcctcctcacccctcagctgtcagttcaaacatttatacctcagggacacctttaccaacccctcatttttatttaagtttcttttgcttcctgttcttctccctcagggagggataatttgtcacagttatcatcatgtatgtatctttccctcacaaccagactgtaagctctctgggcatggtcacctctgcatcccagaattgcctggcacaggcacagagtagatgagcaatgaatcttttttttggaaacagagtctcgctctgttgcccaggctggagtgcaatggcgcagtctcggctcactgcaacctccgcctcccaggttcaagtgattctcctgcctcagcctcccaagtatctgggattacagacacacactaccatgcctggataatttttgtacttttagtagaggtggggtttcaccatgttgtccaggctggtctccaactcctgacctcaagtgatccacccgcctcagcctcccaaagtgctgggattacagcttgagccaccacgcccggccaggcaataaatatttgaacaaatgaatggaagactggaagggaggtctgaaggaagcatcaccctctctgcttcaccggtgtcctgccaattctaggctttcacggagacgcagaagaaacggctgctatcctggaaacagcaagtgctgaagctcctccggacattcccgcgcaaagccgcactagagatgcagaactaccggcagcagaaagggtaggcgggtggccaggttacagggacctgccctccataggcctttgctggttagcagatcgtgcttagaggggtgattgtgttctgggctgagaatctagttttattcagtcactgggcgactttcccagaagaaaatttccactagaataggatgctgagctgaaaaacaacacatgtcccatgagcaggcccctcatatgtaccttgctcctcgcctgtatgcagagggcctggaagtccctccttagaccagacaaataacagaaatgtctcctttgagaattgaagattggagaactgttttgagtggacagtgaagaaacccttgtacatgtcccatctccttccagggggtacccttggggcagatgaggacagaatgtgtgatggaggtttatgttctctcctacaacttggggttgttggggaaggtgaggaaggggtggacagataggccccatctatgtaaattaacaccctgccttctgctctctcatagctgggcattcggctccaactcgctccccatagctggctctgtggggatgggagtggcccggcgtacccagcggcagttcccaatgcctccccgggccctcccacccggccggatgggcctcctgagcccctcgggcattgggggtgtctcccctcgacatgccctcaccagccccagccttggaggccagggccgacaggtaagctggctggaagcaggggcctggcctcctggggttggggtggcagtacctgggatgtctatttgcctgtatactctgtgtctggacccagcttagaggtggcgggggtgggagtgggagaaggcctgtaccacctccaccactcttgggtctgggcctcttctgcactcactactttctctcttcctgggacctgtgtagaacctgtggtttgccaaccctggaggcagcaacagcatgcccagtcagagccgcagctctgtgcagcgcacccactcgctcccggtccactcgtcaccccaggccattctcatgttccctccaggtgaggtgccccacccttgggactctgcctggccaacatcctcagctgacctttcttttttctcctgggtctcatgtccactgttcttctagactgcattggcacctctccccatacctcacaccactctgcacccatctcccccaattgtggggggttgttttcctcctctgcttcaattttatctctcaggtcttgcccccacccctctgagtcatcatctctcaccccttactcctaccccatctcatgtttcccaccctatgtcataatcttagtgtctgtgttgctctttgtcatcatctctttctttacaggatcattgaatactcaacttagaaggggttgaggggatgggacagttaaagtgtgagatttctgtggaggggagtcctgcccatcagcctactgggattctttcagatgccaggtgaccacacaggaaccagtggacttcacctcttagaacaggtgtttgaagtgagagggctgttttgacctctgcttacagaccatcctggagatgggagagcagaagttgggccaagtgcgggcacagtaactcacacctgtaatttcagcacttttgggaagctgaggcaagtagatcggtttgagaccagtctggacaacatggcgaaaccccatctgtacaaaaaaatacagaaattatctgggcatggtggcacacacccgtagtcccagctactcgggagggtgaggcaggaggatcgcttgagcccaggaggtcaaggctgtagtgagcagagattgtgccactgcactgcagccagggcgacagtgagaccccatctcaaaaagatgttgggacaagtgggcaaaaggaagattagagacttgctaaccgcaggtccctgccctgctcaacaagtgaggggttgactcctccacacggtgctggccactggggctgcagagacagataaggctcgtctggaatgggctgactctagagagagcatggatttgcagaattcatgtcataaactgccaagtcagtcaggagtcttacttgatgaggttgtgtagacagccatctgttgaggccgtgggaacccatccatcatgttcatcctagcacagggcttgacacacagtaggcatctgtaaatgatgttaaacaagcaggtggatgaaccgcaggaatgaacaagaaccattctctttaccagcatgctgtgtcccaggctttgtcagacagctctcctgcactgattgactcctcccaactgtatgtgtaaggacgctgatgttattcatcagtcagcaatctgagacaggtcttgcccaagttcaaaaaaaaaattcttttttttaaggagagacaattgggtgatctgatacgacatgagctcagggttcagagggaacagtgatgagagatgagggtggagatgggagctgggtcgtctaaatccaggtaaacagctcggactttgtcctgatggcagtgaggagtcagggaagggtttaagcagtgtagtgagggaggtcaggtctgcccagggaggtgggtggtttcccagatgcccgaataggaggcccttttgagaagtgtggtttgaggacaagtcccatggtggttgtcctactttgcccccacctgcctggcctgcctggattgaatcctgcccagaggagcaggtccaagtggggacaggaagggttttgatttagcttttgcaccaagtacagagcaggtcttcaatcagggagccttgggggctgcccagtgtccagggcagatgcccagactgtgctcaagacagtatgcagtctgtgtccagagtagtcacagcaggctgtgtgtggcctccaggagctccttcagtttcaattccactctctgcaagtcgggctttttctgtattgccaagcctctgccattgccattgtctcctctgcctgttgtgtgacacgctcgcctctctccctgtccacctcctcccgttcttccctctccccctccatctctcttgctcccttcccataccagcatcctttgtcatcccagctgtcttcacctgagtccagttggtccttaccacccccattctcctctctcccacccagactgcccggttcctgggcctgacctggagatcaatcccactctggagtctctgtgtctgagcatgacagaacacgccttgggtggtgagcatttcctctttccctgacccagctcccacctacccagcgtctctgcctctgaactgagcaactcagagtcatcctgaggggtccccaggggaggccagactccagggagggcctgactgggatgacaggctacctgagtgccttttcttgggcctccctccagctcctgatcttcctcccttcctccctttcttaccacagatgggacagacaaaacctccaccatctgacgggacccacagcccagcgcacccataggctccctgggcggcgggcgggggccaacccccaacgggcttctccgcgacagcgagagggtgggctggctcagctatatattctaatatttttctactctcttaccctcttaacttttgtttaacattggcacatgccttgctcactcccaggcccgtcgagggatctctgctgaggcccggggagttgggggcagccaggataaagggggcagggactggccagactgcctgcctctctcctttccttcctcatccccacctggtcccatcccacccctgcctcctccagaccgctgaccacctgcctctccccaagggagcagactccccagagacaaactgaccactaccttgtggagcctgctcagaaacatttgacatttggggtgacgcgcagggcagagaacctgccctccagaatgttattgagaggagctggggagaaggaaggggagcaaggagaggaagctctctctcctctccctgcttccccttcaccattccccacattctgcaaggacaggagccaccttcctctctctcacctcccctggccctgttcaccagaggttctctatgattaatttcttaggcctatttaagatacatatttatatagttcttaacggtttttctctgatcatttcctctcatttttagaatccccaggtctctctcagccaagacagtggcagggagagcctgaactttatgaggggagagggcagagccccctcctccagaccctcaagctctaacccattttcctccagccctggctacccggatgaagaggttggaggtgggcagccagggtagccagtgaggtcaggaagtctgttgccttaacgtccccttccccacgaacacacacccttctccgctcccaggtctggttggtgagacttgggagtcaggaataagggaaaggggattgtttggtttttgggtttttccctaagcccctcccttttctttcagcctttttccttcccccattatgtcatgacctcacttaagtggaacactatatcataacccagagattcgtcccagccccagagtccgacagactgtctggtccctattcctaatgaggggttgtgttggggcccaggtggagggaggggatttgggggttcagactgcggggaagccagggtctccctcttcaacgccctcctccccctcaacccaccttcccaactgggacattctcaagcttttcacaccgaaaaggaaaaaaaatgttatttttagatacattttatgaataacttttgttatgaatatggctggtaaccattgtgtatgttattaaagatacaaaatgttgggaaaaaaacaaaaaaaacaaaaaaaaaaaaaattttaaaaccaccaccctccctgcactatcaccccattccccagaccttcttgcccccgccctcctggtctgtggacttccctctgctctgagcccagggagggggaagaagccagggggtagggtggccctgggaacctggctctgggtccccacttcctctcccagtgccgggctgggtggggtgtcaggtttatttatgtacctcttgcacactcatcaacctatgcaagtcccccaccccggccctccatgtttctgtgcctttgctcatcccctcaatctcccagggcttctccagtccccctcccactagctgcaggaagtgggatggatgggccacctcgtttggaatcagcagggtgtccctctcatgggaccctcccctctccccagcctgtcctgtcttgttcactctccatcagggtgagctgactgtgcctggcactgggaggtggtgagggacaccgtctcacacacacagggaggcaagagctgccccccaccccacctgacagcagagtgtgcaggacgcaggcggccccactctgatgggcaggaccctgaccctctcccgctccagccccctccccaggccctcctccatgatttcaccctccctacccacttctgtccccggccccactggcagaatcagctttgagtaactgtacagtttttctcgctgttggagaagacttatttgttggagtttcacttgtttaatggtctgggcttattttggaaaaaaaaaaaacaaacaaaaaaaacgaattctgaccttcgttgtgctacattttgtgggaaaccattggccctgcctctggcctgtgtttctaagcctcaagccaagatccttgagcacctgggggttgcgggaggtatgtgctgggctgaatgacatcataggggctgggaggggaagtaaagagaagttgactttattaacagcaaaggtttgggggtggggaacaaacaagtgaaaggctcacaaacagaccactagaaaagtgctttgctgctcacaataatggtgtctgaaccagccctgaatgccctgggactcagtcactgtcactatcagcttcactggaatcagaagctgcagcttcactgccatcctcctgggccgagtgctcgctgccactggggaagggactggcgctgcggctgtggctccggctccgctggccacccccattgctgccgctgtctgaatcattgtcactgccaccttgggcctgtcctctgtcctcatcatcagagtcggcatcgtcctcagaatcagcatcactgccaaagatctcctctttgtcacgggcagcccgggcctcatcctcgctgctctcgtcctcaccactgccactcttgtcactggcctcgtccctgtcaccttcctcccgttcactctcgctgcccgagtgctcatcttcactgccctccttctcactgctgctgcccttctcctgctcctcatctggaagggagtggagagagatgaaacccacttttccaccctcccagggctcccagagtctggcctgtccagatttacctgagcccccagcttctttctcttctgtctccatctcctcttcctcttcctcctccggttcgtggttttctagctgggccttccgtgcctcctggaagcagcaagattggaatgaggggaaggagggtgttctgctgggtttttgtccccctcctcacctacaaccaccaccctccctgccatgggtgccctgagccagtggtgcttgttacctgagcttccagttccttctcattcatgtcccgatgtttgaccacaagcagggcgttggtgcctgactgaaccccagccttggcccggcgcttactaaggcggaccctgcagggggtgaatttgggagagagaagtggaagatgcagttaaagacacacctcccacttccccgccccccagtgaggggtctggtctgacttggttccccatcaatacttagagtaaatgggaataaatacagattgaataagggcagctaagctcaaggtattgagggcaggggaaaggaaggatggctcccatggcaccagtttggttgccctacactgtgtgtgtgtgttatacggtgtatttacataaatacgggcatgggccatttaacagggacacattctgagatatacatcatgtgaacatcatacagtactcttacacaaacgtacatagtatagcctactacatacctaggctgtaatggtgtagcctattgctcctaggctacaaggttgtacagcatgtgactgtactgaatactgcaggcaattgtaatacaatagtaagtatttgtgtatctaaacatagaaaaggtatagtaaagatacggtattctatcttaagggaccaccataagcagtccattgttgactgaaacatgcagtgcattactgtatgtgtcagttagttaccaacactttgagaaaccaggagatgtcaaatcatttggatttggggcttttggaagataggaatttctggccccacagcacagcaacagtgggctggaagtgaatagtgccctccatggttgcccagaactccaggtcactcagatgctaccagccactgctcttttacatttcctgcctggcctatggggtcacagttcttgtaatctctgctttaaacagaaactcaagacttcccaactctacaccagaggtgctggcatagcagtaaactttgagccataagggaagagttttggagtcacatttttgaacatgggtttaagcatttcatttaaaacattcatgctaattttatatattactccatactttggcaatgtttactttcacatgaagtctgttactaatactgggaaacttggccctctgccttgcgcaaaggctctaaatgtctcctgcattaagatattctggctgggcgtggtggctcacacctgtaatcccagcactttgggaggccgaggcaggcagatcacctgaggtcaggagttcaagaccagcctggccagcatggtgaaaccccatctctattaaaaatacaaaaaaaattagctggccatgctggcacacgcctgtgatgccagctactcaggaggctgaggcaggagaatcacttgaacccaggaagcggaggttgcagtgggctgagatcacaccactgcactctggcctgggcaacagagcgagactccatctcaaaaaaaaagattttttttctggctcctcctgttagaaccaagtccagctcatgtgcatgaccagacatctgctgctcttgtttaccaatgcatatgacaaattcttaggtacaaatgacctccaaggtggctcttgcatgccccagggtcttaagaagcacagatccaggctaatcagataggagtgtgctgagtacctggtttccaactcattgtagtaaaccccgtcaccctctcggaagatgaagaagtagttttcctcatagcccttgctagctttgttcttcacgttccagttgtactcccgagcaattttgtagtcatacctgaagatgagggcacaggttcagccccatttcttccctatcccaatccccaaaacttcccaatccccaaaacttaaccgcaacccacgcacacatcatctggtgcatagtccatctcctcctcctggtcccgctttcgtttcttcaacgtctcttctacaggcaggaaataggccacaaactggttcccttcctcatccatcatgcccctggttgggggaaaaggagtagcaatgaagtgtgaggacaagaggcagcaaggagcaggccaaggtggacagcaggaccacctacctaatcatggcctgagacatcatctccaacgcagctgcaccactcgtgtccttgggggctgggtctgagtcaaagatcacctgagcacatggattgatccacatctagggagatggaggcactggggttagatgggaacaggcacaaataggctgtccctttctacctcccaccttgggcctgaccttaaagtctgggaagacaggcatgacctccaccggtgtgactcggggtttgctgtaatgctgtgagatctggtggaacaaaaacaaggtgaggaggagctctgcagccgcacccttgcctctccccatcccagtccctcaattactgatttctgggcatcctcaaaagtcttctcaatggctgtgatctggctatccctgtctttgtatatttcttcctcggtaaactgctgcttcacagaaaccccaatcctaggaatgaagaaaaaggtccttaggggccactggacacacctaatatctccaccttccctctcttcctgttagtaacttacttgacctcaggcttctcattggagatgccataacggttgaactcagtggagatgtactctgtctttcgcatccatggcaccaccttcgcgtgctgctgggatctggggtgggaaatcaggtatctcaggaccccactgccctcctgcttgtagggcccacctgagccagtctccagtacccatttgctacccactcacctcttggagctggtgggggcctgaatctcctcttccaaaagtttctcatcagctggatctagaagaactagaggagagcggggggcaggaggaccatgagggaggcccaggcctgagcctttgctgacctagagcagaccctccctgtctccccacacaccattggggtcgatgcggtaggtgtcaggattgatgagatcgatggtgacccccaggtctggctcagtcaggaggtcatgtttgtgctgtttctccaaggaagtggctttgtactggacgaacctgggtggggaaacacctattgtggtgtttggattccagcttcacccctcacagccctgcttcccagaggcggagcttctctggggaggaactcagaatgaagtgtcccccatggcagagtctgaaagctggctccccagtgggaagggacttggacactgcttgctccattaacaattgagcagctactactatgtgctagggtaggtactgtgctaggccctgagcagacagcagccaacgagacaagcagtccctgccttcaaggaactcatacctgagtagttttcccattccttagtctcacctgttctggtcgaaggggtaggtgatgaacttggggtcgaaggggatatcagggaggctattgcagtacttgactcggcagaccactccagacctaggaacattagtggctcaaaagtgggcccccgctgccccacctctgctcccagccccactgccccaccgctcctgggaaagcacagtggggctcacctctcaggcagagtccggtgggaattgggcctagtggagaagaaagaaacagtgataggtggagaggacgggattgacaggagaatgaaaaaggcttccccaacctttcaaaaggtaggaggggtgacaaatgctggtttctttgggtggtggtgtggggagtgtccaaatgctttaatggaaggagacaaatgttcaatttatttaggaagaaatgcccccaaaagctttaatgaacaaggccaagtgctcaatcccttttgcaggagatggcttcaagtgctttaataaagaaccatgtactcaatcgtcttcggaagaggggtctccaaacggttgactggagggatcccttctggagggagtctccaaaagcctaatccctgaactgcacggcggggaggaggggaacacctgaatctcagaaggaacccgcccccttcgtcaaaggtgagcgcttcatgacgtcacgggcagacctgggggctggtgacgttgttcagcagaaaccctctcccgatcccccgccttgctgcaacagaaaagcgtggcgcctacctgtggccatcctcccgctgggcctgggtctggatggtgggcgccatagcgacgaggcgacggcagcccggacggggtcctagcgggaccgaagggggacgcagaggggcgtgccgacttcaggggacgcctgatccgaggaaggcccagcttggcgccgctccccgcggaaagtgggttgagatgaggtgggcgggcgagaagagctccagcgagactcaggtgaacgcgcaggcagcaccggggacggactcgaagctccggttccaccaactgccgccaagacgctgaggacccaacgggtctcctcaggccgcgacgccttcggggaaatgaagtccggctcggaaccacacacggattggcgagcgtctgggtgaagggcggagcgagggagagaggtgcttctgtgattggtggagagatatctcagtctggacgcagatttgagagtgacgtaacgttggggcacctccttcccctccattggcttaattgcctagggggcgggactaactagcaaacggggactagaaatagggatgctgaaaagcaacggggagagacgcagtcgtaacgcacttccggcggtctacgcgaggaagatggctgcatcccagcagcaagcttcagcggcttcctcagctgctggtgtatcgggtcctagttcggctggcggcccgggtccccagcagcagccgcaaccgccagcacaactggtgggccctgcccagagcggcctcctgcagcaacagcaacaggacttcgatcctgtgcagcgttataagatgctcatcccgcagctgaaggagagtctacaggtgattggccttaagcagcgagaagcaaactggatttggtagtctagaggggcaggccgagggccaggttagtcggagagagcgctaagcagaaagaggaatagaacctgctgttttggcctggctggtgcacgcctgtgttcccagcactttgggaggccgaggcgggcggatcacttgaggtcaggagttcaagaccagcctggtgaaacctcgtctctactaaaaatacaaaaattagccgggcatggtggcgcgcgcctgtaattacagctactcgggaagctgaggcaggagaatcgcttgaacccaggaggcggaggttgcagtgagccgacatcgtgccattgcactccagcctgggcaacagagcgagactccgtcaaaaaaataaataaataaataaataaaactgttgttttctgcgagacctaagcgaagctcggcagagatgggatcagcgctgatgctgaggctgggactggccggagcttgagtgaggggttgtttaaaggagaaactgggctctggtcgttaaagcctgaggagagtactggcttatacggagattctgcccttgattgataggtgagggaggacccttaggttattggcgagaagctcaggtgagagcgggcctctgggaggatggagtggtgacagctataggaatggaaacgaatattactttggaaagtcaggagggaaggtgccagttgaaaagaaaacctgagactgagtgatctcaagaaagagtgtagatctgccagaggtattcccttttgtttttccatttcccacgtgttttgtttttgttttgactagaccttgatgaaggttgcggcccaaaacttgattcagaacactaacatcgacaatggacagtgagtgcagccccctttaccaggatattctattgccttcccagtctttgaaattcatctttccttctcctgctccccgcccacctcaccttctatatttacttttttttttttttttttttgagacagggtctccctctgtcacccaggctggactacagtggcacgatcttggctcattgcagccttgaacacctgagttaggagatcctcttgcctcagcctcccaagtagccaggactacagacatggctacagactacagatgcctggctaatttgtaagatttttttatagagacggagtcttgctatgtttcccaggctggtctcaaactcctggcctctagccatcccctcagcctcacgaatcacttctcctattttattttatttttgttgttgttttgtagagacagggtcttgccacgttgtccaggctggtctcaaactcctgggttcaaacagtccttccaccttggcctcccaaagtgctgggatgacaggcatgaaccatcatgcccagccttttccttttctttctttctttctttcttttcttttttttttttttttttttttttttttttttgagacagagtcttgctctgtcgcccaggctggagtgcagtggtgtagtctcagctcactgcaacctctgcctcccgggttcaaatgattctcctgcctcggcctcccaagtagctgggactacaggcgcgtgccagcacatctggctaatttttgtatttttagtagagatggggtttcaccatgttgtccaggctggtcttgaactcctgacctcaggtgatctgctcgcctcggactcccaaagtgctgggattacaggcgtgagccaccgtgcccagcctccttttctttttttttgaacccctccggttttcaaccactacttcagatctcctggacctgtacctggtttcctgatggacacttggttgggtagatactggtgtcccaaagattagaaatcaattcttcagacatccttttttccttgtctgtagaaagagcagtgatggacccatacagcgctttgacaagtgcctggaagagttctatgcactctgtgaccagctggagctgtgcctggtaagaagccttctggacacggggtaacaacagccgtgtcccagtctctggggtcttcagaaacagtcagtcagtcaactcacactcaactggggacctcctgtgggccagacctgtgcttccaccaacactgaggacacagggttgctctgatccttgcccttgcagagctttcagttgagtggaataataagcacacccctaaacagtgacagctcagagtggtcagtgctgtgatgggagaagcctaggccagagtggttagggttatgattgaggaggcacaggcagagggatcagggctgggatggggaaatctcagtgtggaagcccagggtggggatagggagagagtggcttagggaaggctactgctagacagcacatctgaccaagtctgaaacaaagaagagaagaggggcaggagttgagaggagggtaagtgactaagaatacagcctctggagtcagatgcaccatcaatctctacctctgacctctgggttcctccttaggaaaacggagtttccaggaaaacttagattatgcgtgtaaactgcttaacatgataccaggcatatggcaaatgtgtactgtagtatcatcattattttggactggtttttttggtgggggggtgtgggggaggacagtctcaccatcacccaggctggagtgcagtggcacgatctaggctcactgcaatctcctcctcccagtttcaagcgattctggtgcctcagcctcccaagtaactgggactataggcataccacgcctggctaatttttgtatttttagtagagatggggtttcaccattttggccaggctggtcttgaactcctggcctcaagtgatccacccgcctcagtctcctaaagtgctaggattacaagcatgagccactgcacccggccttttttttttttttttttttttttttgagacagagtctcactctgtcgccaggctagagtacagtggcgcgacttcagctcactgcaaccttggcctcccaggttcaagcgattctcttgcctcagcctcctgagtagctgggactacaggcacgcaccaccacgcccagcaaatttttgtatttttagtagagatggggtttcaccatgttggccaggatggtcttgatctcttgaccttgtgatccacccacctcaccctcccaaagtgctgggattacaggcgtgagctaccacacccggctttttttttttttcctccaagtcagagtctcactgtgtcgcccgggctggactgcagtggcacagtctcggctcactgcagcctctacttcctgggctgaagtgatcctcccacctcaaagtagctgggactacaggcatgcactgccatgcctggctaatttttgtattttttgtagagacggggttttgccatgttgctcaggccagtcttgaactcctggggtcaagcaattcacccacctcagcctcccaagcgctgggattacagaccgctgtgccgggcctggcctgggttttgaaggaaaagtgggaggttgagaagcttggtagtgtcagaaccatgttccaaacagagggaataacatttgctttaaatttgttttaggaacatcaagtaattcattctggctgaggtgtggtaggcatagggcttgttggattttgaatataatcctaagggcactggggaagcatggagggtttcaagcagggaagaatatggacctatctgctttttaggaatatacctctggctgacaaatgaggggaggttgaaccctggaggcaggagcccaagggcgcagccatggcaggatccaaggacgcctggactgggctccaccagggcggggtcgtgaggaaatggggaagactgggggaacttgagaggcttcgtgtgcagggctttgtatatgggccacaggaccggtgtgctggaaggagataaagtttctaggatgaggcccaggactctggtttataatggaggactgtcactgggcccggtgattcatgcctgtaatcccagcactttgggaggccgaggcaggcggatcacaaggtcaggagatcgagaccatcctggctaacacgatgaaaccccgtctctactaaaaatacaaaaattagccgggcgtggtggcaggcgcctgcagtcccagctactagggaggctgaggcaggagaatggcatgaacccgggaggcagagcttgcagtgagccgagatcgcaccactgcactccagcctgggtgacagagcgagactccgtctcaaaaaaaaaaaaggaggactgtccccgaaacagggacctaggagaagcagttttggggagtacaagggccctacaaatgtcagggggaggccagcgacagtgtgggcgccattagtgcagaggtggaaactgagtggtgtgcgtgggtgtgacagccctgggagggcttgaacagtgagagaagacagggcctaggaatggctgcacttacgtcttaggtagtgtaagaagtacctagagctggtcaggcgcggtggcttgtgcctgtaactccagcattttgggagcctgaggcgggcagatcacaaggtcaggagttcaagaccagcctggccaacatggcaaaaccctgtctctactaaaaatacaaaaattagccaggcatggtggcgtgcacctgaaatcccagctacttggatgagacaagagaatctcttgaacccgggaggtggaggttgcagtgaaccaagatggcgccactgcactccagcctgggtaacagagcgagactgtctccaaaaaaaaaggggccgggcacaagtggctcatgcctgtaatcccaacactttgggatgccaaggcgggtagatcacgaggttaggagttcgagaccagcctggccaatatggtgaaatcccgtctctactaaaaatacaaaaattagccaggcttggtggcatgcacctgaagtgccagctcctctggaggctgaggcagaagaatcacttgaacccaggaggcagaggttgcagtgagccaagatcgtgctactgcactccagcctgggcaacagagcgagattccacctcaaaagaaaaaaaaaaaagcctgggcgcggtggctcatgcctgtaattccagcactttgggaggctgaggcgggtcggtcacctgaggtcatgagtttgagaccagcatggccaatgtggtgaaaccttgtctctactaaaaataaaaaaaaaattagccgggtgtggtggcgggtgcctgtaatcccagctactcgggaggctgaggcaggagaatcacttgaacctgggaggcggaggttgcagtgagctgagatcgtgccattgcactccagcctgggcaacaaaaccgaaactccatctcaaaaaaaaaaaagaaagtagtacctagagcagccagagaagcaggcagaaaaccaggggtgagatgccactgccaacaccaggcctggagccagggcagtaacaatgatagtagctaacagttcttggcactttaaacagtgtgccaggacccgtgcctgtgtctcatacacctgctctcactgttctcaccttatgaggtaggaagaggtggttattaaacccgttttccaaaggaggaaactgaggctcagagaagagtagccgccatgcccccaggttccccagcaaatgactggcagggccaacctctgactctaagacctgggaaatccagaggccaagccgacaacccccagctggcccttggggtggggtagaatgacctcgggtggagctgatgctgtccccttgcctgcctgtccacagcgcctggcgcatgagtgcctgtcacagagttgtgacagtgccaagcactctccaacgttggtgcccacagccaccaagcccgacgcagtgcagcctgacagcctcccctacccacagtacctggcggtcatcaaagcccagatttcctgtgccaaggacattcacaccgccctgctggactgtgccaacaaggtcacgggcaagacacccgcaccacctgctggccctgggggcactctgtgaagtgggggacagggagtggggcaggcagtggttggtgggtggtgtgcaaagggaatgaagagcgtcctgggcctaaacacagcagcctcctctcttcctgcctgagcaccgcagcgggagccagcagggggcagcagaggccaacagggagctcgcaggccgggcccctgcgtccctgccccttcttcctgctccccctcctagcctagggtagactttgaactgtgtgtgttgatgacttctctgttccacaggccctcccccattcttgcctgggtgtggagccctggctgtcccctctccctcagtccttcctgactgtctccagctgggaggtggtctctgtgtgccactcctctgtgtctctattacagttgtgtctctctcatcctgtctctttttcccttgtttctctgttcctgttaatgtgtttctccccatggtcctatttctctcactctgacctctctctcttagtcccctttagctgtcttctatccccagctcctaactgggactctgtgtctatgcagggggccagcacccctgggttatctggggctaagggaagggacttcatttccaggggccacagccaagcccagagtcccccagcggctcgcatgtcagcccagaccccagggtccttggcctaggagaggagcagtggaggggcccaggctctgagctccacaggtctgagcagggagcaactcaggcccccacccaagcctgcgtcagcggaacttgagtgaggggcgttgtgcaatttgtggcaaggctggcccagctggatgcctgggtcccagtatttttagccccaaaggagaagtgaaaaggccccagccggggtgaatcatcagtcctggggaagaacccaggcgcctgagccccagctccgggaagcaggcactggggagggggcttcaaggagggagtgccccctcagactccctgcttccctggaagcttcaggaagctcagcctcagccttcaggcctgagcaagtgcagggcggagctaccagcccaggctcagatgttggggtgtgaaagcctcaagtgactcagcctggttggagaactgccccacccagtatcttctgtgccatggttcccacattcgcactccatggcctcctgtcctggaccccacgtctgcaaggaaaccctaggaccatggatacctctgtgattcacgctgagcccaagtccccacactggaaaactgggaaatggccagctgtgtgtcccaggaaattcctccccttattcttccttgaagtgcccgagcatgtagggcaagaaggaaggctgaagcgctgtccctaggaggaatttctccttcaggggagcctcagttttgcccatttatctaattgaatcagttttttacccaatcccccgattttgtaggataatctcccttatctaaagtcaactgattatggactttaatcacatctacaaaacacttccatggcgacagctagatgagtgtttgaataactgggactgtagcccgtccaagttgacacataaaactgaccatcgggccgggggcggtggctcacgcctgtaatcccaacactttgggagcccgaggcgggcggatcacaaggtcaggagttcgagaccagcctggccaacacggtgaaaccccgactctactaaaaatacaaaaaattagccgggtgtggtggcacacacctgtagtcccagctactcgggaggctgaggcaggagaatcgtttgaacctgggaggcagaggttgcagtgagccaagatcacactattgcactccagcctgggcgacagggcaagactctgtctcaaaaaaaataaaaaactgaccatctagtccttgtcatctgggcaccctcacacatctccttaaccacacttaatctccaaataagtacgataacatagtcatagtcccacccaacatgatgcagttatcttgcatacaactgaagacaactaaccctttccccaacagagcccaccagcagtggtggagatgtcggtccatgagcgcacacacaagactgagggactgtcggccctcccaggtggtgtcaacacaacatcacacacaggtgggggggcctgatagcccagcacccatgatacagggcctaccaatgcttaaaaccacacccagggagcccacagaggcactcagtgggtggtggggtgatggatacacatctatcaggcacagggcggaggtgggcaccactgagttgcactcagcaaacacattgggtatcttgtgcccaaggcctgtatttgtggagctgatgttctagtgagagacagtaaatgtgacaaaagtaaaatatatcagatggtgagaaaacagaaaaatgagatcagaagtggagatgttggggccaggcacagtggcccaggcctgtaatcccatcactttgggaggtgcaggcaggcagatggcttgagcccaggaattcaagaccagtccgagcaacatagcaaaagcccttatctgcaaaaaattcaaaaattagccaggtgtggtggtgcgtgcccaggttcccaggtactcggaggctgagaggtgggaggatgccttgagcttgagaggttgaagctgcagtgagctgtgatcgcaccactgcactccagcttggttcatggagaccctgtttttttaaaaaaagaagtggaggtgtttacaccagcaaaatactcattttttaagtgtaattaagttgaagatcaaaaaatggaaatgtataattaaatcatacttagcaaatctaacacatgaaatgtaacatctgcatatggagaatcgtgttactttattgaaaaacattaaaagtttgagaacttaagttggattgtggtttcgtgagcattcattatggtttatatatgttccatgtatttattattaaatagatgacaagggttttcttattcttgtttatatatgtttgagaccagtctcactctgtcgcccaggctggagtgcagtgacgccatctcggctcactgcaacctccgcctcctgggttcacgtgattctgctgcctcagcctcccaactagctgggattacaggcgtgcatcaccacacctggctaatttttgtatttttagtagagacggggtttcaccatgttggccaggctggtcttgagcttctgacctcaagtgatctgcccgcctcggtctcccaaagtgctgggattacaggcacaggcacgagccactgcagtgggccttttaatttttgttttaatccttgacagaggtcaaggaaggcctcactgagaaggcgatattagagcagccccgaaggagagggaatgagcttggggacatccacacatccaggcaagagtgctccagacagagggaactgcaagtgccagggacctgggacaggaatgtgctgggatttatggaacacataaaaaggaggcttgggcacaatgagggagcagggataggagaggaaatccagacaggtcacagagggccttggtgaggacttgggtttgctaggtaactaaacccagagggagactacacagtctggtgcacactgcatgctccagggacggggtgtacgtgaggtgcacagccaccacaaaacagaccgtggggactccagcacacagcatgtctgccccactgcagagctaacccaccatcctacaatcatggtgcccccagggaccccatcccattgacagtcccacaaacatactttcagggagcaacccagccacatgaatacacaaacaaccctctaaccaccactttaccagataagctatctctcaccccatcgcagactttgcccatcacaggctgactcagccctgtccttagcccagcactatcagaagcagcctcatcggcgctgccccagcttctcaggtactcatgtctgcacgtctgctctgcccacagaggccgacacaagaacagtgacatggaggggggagctcgccagctactctccccatcacgcaggctgtagacgtcagaaaccaaagttcatcggtttctctgccttgtgactcgggccacaggaactgcattcagacgccggcctgctgtggtctgcacatgcagtctcagacacccacgacaaaggacgtggacatatgtgaacacttcacacacccagggactacacacactgagccacaaaggccttgcacacggccacagctgcagagtcacagatgctgacacagcttcaaatgtgtgtgccgggtgtggtggcacgtgcctttagtcccaactacctgggaggctgaagtggaaggatcgattcagcctgggaggtcgaggctgcactccagcctgggcaacagagcgagaccctgtctcaaagcaacacacacacacaaagttgtgtgtgcacacagcctcagtcacaggggagggcagtcattccctcacccaggcacctgcgcggagttacacacacttagtcactgcagatcccacagtggctcagagctacgcacagatatgcaggtggggatgaaaatctcatgttcttaagaatgccgcctcagagacaaattgcagtacagttacaacagagcatccaccccacacccagagatggccaaagtacacacggtacagtcgatcacacaggcggtttcacacattgattcacacagccaagtcatgcgggattgtatgcacacagccttctcacaggaaactgggcacactcgtgtccctcacgttcccccactgcatacccaggcacacaggctctcgcagccccagatgccaaggcgcacacctttgcacccgcaagcacacatactgttcacacaaccgggtacacatgacggctagcccaggcccgccgcccacgcagtcgcaggccagggtacacacggccagcgccgcccttggccacgcccgctcaggcccaggcaatcgcgccaggcgcacacacggcgcgagcacacgtgccgcgggtacacgatccccagctcgcccgcgcactcggccagctctcacacccccgcgtttcccgtccccgcttgtttttctggaaactctgctctcccctcccctccccctaggccggaagtgttggctgtatttttagcctctctggtttccgcccctttccttctttccccgcccgcccaggactggccccagcgccccgcggggggaccccggccatccccttccccaccgtcattccagaggggattcccggccgccgctggggccgcggattttcccgctggctacgtagggagcagggaggagtcctgccatgaacttccttctggcctgggacgcccgagatctgaggggagggctgagggcctggtctcctggatctgatcgaggacaggctgggggtctcccgggtctgagggaggaggagttaggggcctgaaccgctggatctgagggaggaggagatgggggcctggacccctgggtctgagggaggaggggctggggtctcgggggacctgaggatctgagggaggaggggctggaggcctggacccctgggtctgagggagggggggttgggagtctcccgggtctgaaggaggaggagttaggggcctggacccctggatctgagggaggaggagctgggggcctggacccctggttccgagggaggaggggctgggggcctggacccctggatccgagggaggggggtgctgggggcctggagtcctgggtctgagggaggaggggctggggacccagggccctgggttactgcgagggaggagggactgaggccttggctcctgggtcccccaggtctgtgggtttggggaggtggaggaccagtccttctgcgagcaaagcatccccctcctttgagagtggccctatcccaaaagtcctgactcttggggccgatgactcagcagatgggagagaggagggggacagcctgactcagggatgggaaatgctcccggtctccagggagtagaaactggaatccctcctccaggattgatcgcagcccgagctgagccgggctccgcgaacccaaggatgcccccaacccccctttccccgcctcaatcctttaagctgcgtaaggatttggagatcggcctagaggcgggtcccaggtccccctcctcccccctttttccccgttgtcctcaaggctctgtttacaggagacgggagccctggttacaggagaggaacccgagtgtccgggctgaacctcctcgtcacggcttccaggaagcccccactcccccgccccttgcgagtgagtcacgggcgagcaggaggccacaaccgtgccagagccgcccgcggcccgcccagctcacgagaccggcccgggaaggcccctcagcaagcgccgcaccagggattcccccccgccgctctcggacgaagcaggtcgacgtggagcctggcagaatctccccaccttaatacaagcccgcagcctgcaagaatgaactttccaccattataactgcgcactgtggcaatgatttctacccccacattttcactcagggcatccagctctccagcaccccttagaaaatagtcttcctagatcttaagagggttttcacttagggcgaccctttgataacaaaagatgtgccagtgtggggaatgatccttgaaaatgtagtctgggcggggtgcggtggctcacacctgtaatcccagcactttaagaggccgaggcaggtggatcacctgaggtcaggagttcgtgaccagcctgactaacatggtgaaacccccgtctctactaaaaatacaaaaattagctgggcgtggtggccggcgcctgtaatcccagctactcgggaggctgaggcaggagaatcacgtgaacccgggaggcagaggctgcagtgagctgagaccgcgccattgcactccagcctgggcaacaaaaacgaaactccatctcaaaaaagaaaaaaaaaaggaggcccggccggcttggtggctcacacctgtaatcccaccactttgggaggccgaggcgggttgatcacggaggtcaggagatcgagaccaccctggctaacacggtgaaaccccgtctctactaaaaatacaaaaaattagccaggcgtggtggtgggtgcctgtagtcccagctgctcgggaggctgaggcaggagaatgcgtgaacccgggaggtggagcttgcagtgagccgacatcgcgccattgcactccagcctgggtgaaagagcgcgactccgtctcaaaaaaaaaaaaggaaaatgtagtctgaaggcacaccccactataagagacccatccagccatcaactgaggatgacctttttttttttttttgaaagcttttttcaatcaatgcaaccatcagttatagtgaaagacctccaccttgccaatcttgagttttctcagagggcaaacctcgacataatttcagaccctagtatgaggcctgtgccatttgctagctcgaactaggagagtaactttatttttccccctgagagggagtctcgctctgtggcccaggctggagtgcagtcgcctgatctcggctcattgcaacctctgcctcctgggttcaagcgactctcccaccccagcctgctccctccccgcccccgagtagcgggaccacagggtgtgcgccaccacactcagctaatttttgcatttttgtagaaatggggattcgccgtgttgcccaggctagtctcagactccgagctctagtgatccgcctgccttgggcgcccaaagtgctaggactacaggtgtgagccgggcaggagagtaacttcactttggtttcctcctgccttaaatgggcataccacctggcattaggattaatgtgcgtaaagtacttagaactcagcccaggtgagttctccttaactcagcctagaagagatcatccgcccgagggtgagggggctagagccgccctgtgaattgggaaaggaggccccttttcagccttgccaggtatcctggaccccacccaacccactcactcacccacccaaccccagcaagtggggagagggagagcagtccaggtctccttatctgtctgggctgtttaggagtgagaccacacaaggcaggcagttctcagagaattcccctccaaggcctgctggctctttcttggcactttgctctgcagatttctttccgtaagtgcttatttctcacagtctttctcctttttgtccagtttctttttctttttaatttttttaaatagtattttttgtagacatgggatctcactgttgcccaggctgatcttgaactcctgatctcaggtaatccacctgcctcatcctctgaaagtactgggattggccgggcttggtggctcacacctgtaattccagctctttgggaggcggaggtgggaggatcgcttgagccccggagctggagattagcctgggcaacatagggaaaccccgtctttcaaaaaaaaaaaaaaagaagaagaaaaaggaaagaaaaacacaaaaagtgctgggatcacaggtgtgagccactgcgctcagcccctttctgtttctttttgtgatcctcccaaccctcttctccctctgaatctgtctctgggactgtctctgtctccccgtcttccctcccttcctcaccctgtctatctctctctgtatgtctcttggtgtgtgtgtctctctcgatgtttttctctctgcctgtctgcctgtctgtacccctctgcgtctctccccgcccccatccgtctgtgtcgcacgcgcacccccatcgggcttctgctcttgtcaattgcccctggggccctgcccccacctccgccccagtttccttctacaagcctcagtctccagctttgaaaactgggcaggcgtccccccatccgcacccccaccccttccccacgcattccccgctcggtcacggctgtccaccggccaagctcaggcgcgtcctggcccagggccgggcggaagggaaccagtccagggccagccaggctgcgccgggggcgcgcgtccgggaagcgcccctcctgccccgcccccggccccggccccggccccgccccgtgcttgcagtttcctataagtagccggctctcggtgccagcctcagcctgacttcagcgctcccactctcggccgacacccctcatggccaaccgttacaccatggatctgactgccatctacgaggtgagtccccgccgcacggcatccccggtacctgcatgcctgagtccgagtccccacctctctagcgccgcaaactccagcccgggacgcttgcctcccttctccaactggggctccctagcgccgcgccctccagcctggggcccctgcctcccgctcagaccagcttggtgatttggaggtgaaaatggaacccgcgacacccggctcttcgctcaaacatgggtggggcggcccatgcaagtggaaagtcggagaacttttctcagaccgaggctgcctggaggcggaagtggcccccatacctggctcacccctagtcgttgctgagggcgtggttttgcgcggaggcgtctctggggctgaagtctcagggtggggggatccgacttctgtctctccagtccctgaccgtagagacagagaaccctaaaaccgaagcaatccggacttccaggtcaactttgcccggtttctccagttgtgaaactggagatcccgacgcgtgggtcatatccggggaggacaagagacccaaaattgggaaacagtggtgcgccctgacttcggggtccccctcttggtccagccggggaagccgggattcctgggtccctcgggataaggcctcggtggtgggtaaactcagaacctccaactctgggttcctggcatccggaacccaggggtttctgcgggcgggtggggctcaggcggggagcccacaaaccggcctggcaagctctagttccctgcagctggggtggggcgtcgccctgcattttcaggtgccttaaccgacccatttccgcagagcctcctgtcgctgagccctgacgtgcccgtgccatccgaccatggagggactgagtccagcccaggctggggctcctcgggaccctggagcctgagcccctccgactccagcccgtctggggtcacctcccgcctgcctggccgctccaccagcctagtggagggccgcagctgtggctgggtgcccccaccccctggcttcgcaccgctggctccccgcctgggccctgagctgtcaccctcacccacttcgcccactgcaacctccaccaccccctcgcgctacaagactgagctatgtcggaccttctcagagagtgggcgctgccgctacggggccaagtgccagtttgcccatggcctgggcgagctgcgccaggccaatcgccaccccaaatacaagacggaactctgtcacaagttctacctccagggccgctgcccctacggctctcgctgccacttcatccacaaccctagcgaagacctggcggccccgggccaccctcctgtgcttcgccagagcatcagcttctccggcctgccctctggccgccggacctcaccaccaccaccaggcctggccggcccttccctgtcctccagctccttctcgccctccagctccccaccaccacctggggaccttccactgtcaccctctgccttctctgctgcccctggcacccccctggctcgaagagaccccaccccagtctgttgcccctcctgccgaagggccactcctatcagcgtctgggggcccttgggtggcctggttcggaccccctctgtacagtccctgggatccgaccctgatgaatatgccagcagcggcagcagcctggggggctctgactctcccgtcttcgaggcgggagtttttgcaccaccccagcccgtggcagccccccggcgactccccatcttcaatcgcatctctgtttctgagtgacaaagtgactgcccggtcagatcagctggatctcagcggggagccacgtctcttgcactgtggtctctgcatggaccccagggctgtggggacttgggggacagtaatcaagtaatccccttttccagaatgcattaacccactcccctgacctcacgctggggcaggtccccaagtgtgcaagctcagtattcatgatggtgggggatggagtgtcttccgaggttcttgggggaaaaaaaattgtagcatatttaagggaggcaatgaaccctctcccccacctcttccctgcccaaatctgtctcctagaatcttatgtgctgtgaataataggccttcactgcccctccagtttttatagacctgaggttccagtgtctcctggtaactggaacctctcctgagggggaatcctggtgctcaaattaccctccaaaagcaagtagccaaagccgttgccaaaccccacccataaatcaatgggccctttatttatgacgactttatttattctaatatgattttatagtatttatatatattgggtcgtctgcttcccttgtatttttcttcctttttttgtaatattgaaaacgacgatataattattataagtagactataatatatttagtaatatatattattaccttaaaagtctatttttgtgttttgggcatttttaaataaacaatctgagtgtaagctgggatcctggcttcttcgcggtctagagacaggaatggagagggagggggtgactttttggaagctgggtgcagttaactcttcctctccgagccccgcggcgcttacctggcaggaagtgacgtcaccgggcctggccgttcacctgaaagggtgggaccaggtgaggtcaccagatgggaaccgggggagccagttcccgggcgtcgggggcgccgcgctcccgtcctgctgggctccttgacccagcttcgggcgggtgcggtcggggacgggatgtttccgtccccacggggccgcgggaggcgggaggggccgggtggggaggacggaatgtgctggggcgcgcgcccagagcgagcgggggcgggcgcggggcggggcagcctggggtagcggaacccgtttcgggactagaggttccgggggggcttcgacaccttctggatgttggggaagcgggtttagggtctcaagaggctaggatctcaacatttgggagtcacaggttgcatcccctagcgctttagactctagacccctggtggctcggagttgcagatttctggccacccgggaccctggagcccgggaattaccgggtcttggcatttccgaaccttggaagtccgaggcttcgcacaccgaccagggtcggccccgcgaggccagggcgtgtgggtaggggccgcgcgtctaggaggggccccgggggagccgcgtcttcagaccatacaaggccagcgtcgtcgggaccaaccccggggccccgcgcccggaagccgccctgcgtcagcgcctgcggctcggccctgccgcccagccttcgccccctgcgacccctcttttttctccttgccccgcactcctccctcctccctctcacttccctcttctctcctttccctaccctcacccttcctcctctttttcacttcctcctctgcacccttctgccccgccctacaccctttgccttctgttcttctctccccctccaatttgtcccctccctcattactcctctcccacttccagcctccccatcctgccgtctcttaccccctttctcctccttcccgtctcccttctctccctttttccgtccttctttccctctccaccctttccttgccctcccactccccattgtcctcttcccctcctccccctagccttactccttctcctcttctctctccctctgaagcccctttccctcctctcccttctctctaccctcctcaagcctccctcctgctctcaggcctccttggcccactccccttgctcactgacatttggtctcctcttccaggaaactgcttcccttgtgggaaagggctcaggccctaataagtagaagaggatcaggcgagagggagtcagaacccctgagatgcaaaggcagcagaggggcagagaccaagagcaagcagtgaagagacatttgcagaaacagtcttggagactgaaagaacaacatctctggtccttcctttagccagatctgattctctgccccttccccaaaaaatccctcatataagaaaacggcacttctcaccatctaccagggcttaagccagacacccaggagtatcccttgacaccttgttctcaaatccacaccccagtccaacagcaatcctgtctgatccacctgcaaaatagatccactatccacctgcccccaccatgacccccaccctggtcctagccaacatcgtctgccatttgcatcttcatagcagccccagccccagtctctgctctagcccctgccttcagtctctcctttctccactcccccacgagacaaccaaaggaagcctgttatgagacctgagtcaggtcacataaaagtcaaagtccgaagtcctccccacagcccacacaatctggcacccatcgcttaccctcccccttggccactctgctccagccacactggcctcctagctgctctaccaagtctggtctgcttcatccataggagctttgcactagctgttccctctgcctgaacactcccctggtgtccccatggctcactcccctccttcatgtctctgctcaaaagttgccttctctgtgagatcctccctgaccactgctgttgcaatccacaccccacctccaactaccccatcctccctaccttgctcgactttttccatgacatttatcatcaccacctaacattaaaatgtacttaattcttatgttgacagcaatctgcctccccactagaatgtcgcgtcctcaggggcagggactacttgttcactgctgtattacacacagctaaaggaagccaggcatagtgaatgttcaatatttattgaaaaaacaagtcgactcaaaaacatagttttccttttcaacagaggtcgaaaactccaagacagatagctatgttcatctgtaaaggaggcattaaaaagacagagaaatacagaggaggcagagtcatatacagtttgccgaggacccacatctctacagaagtcaaactgtttgcacacaattccatgcccagagcatctaataagagacgatacccccacctggtggctgggacggaaacggcacctccctacaatacagaacacccaaaggaccgtcgccaaagccctaggagtcttttgagcccaataattcaaaagatagaaacgttcattcatctaagtgatgtagatgttttggttggtttattagatgtgtaagtttataaaaactgatggggaaaaaaagtgctccaggtgaggatcgaactcacaacctcggcattgctccgctcgcactgtcatataagtaccgcgcgctaaccgattgcgccactggagctccggccgcacccctgcgccggggtcttcttcagtggttcatagccacgtgacctcaccggagggccccgccttgtgttatatatgcaaattaaacattttgcattgaccaataggagacagtgcattgccagttccggattctcacgcctcgcggcccttgctgtaaaagggaaaagtccgcgaggcgtttggaatgtaggggtgtcgcctaccagaaggacacgcctcctcatgaatattcaaaacaaggggtggggtcttaacccttcgctggcgggtcggccggaaggcagcccctcccccccccgcaggcgggaacaggatgtgagccccggcgacagcgggggaggggaagccccgggcgaccgccccccgcctcacagctgggatcggactctcccgccccagatgtggcgccgccgccgtcacacgagccccgtgacacccagccgggagcccgaggggtccagaggctcggacccgggcgtccggaatttctgcaccgcatcctgagagaccccgaggtccagaccccggcgcccaggctggaggacttgagccatccaggtgcgcagcgccccctcctggagcagccgggagcccggacgtcaccccgcgagaccctggaggccgagcgccccgtatccccgtttcaagaactcaggatccaggaccgcagactccctccagggctccgatcccaagaccccgcgttggaggaacttgagatccggacttctaagcgccccaaccagtttcgggctgcagcggccatcgcttcaaggggacccaggactttgggacccccctgtgctcccacctggagggagtttcattcctgcccctagaattaggggaactcagaaatccatcccccaccccacggccctacctagaagacttaggaatgtgggtccccagcgccgccatctgagactccagagtcgaggctcctagcatcccctacgtagaacactgagaaattccgactgcgggaccccagtctccgagagaccccagattctattcctggagcctgagagcccgaagttcacgcccctgagtctgggctccgcacctccctggggaccgcgtcggggtcgcgcaggagccgggctgcctcgagccggggctggaggctccccgggaggtgaggggggaggcgaggggcccaggcggactgggggagggggcggcgccactgctgaacaatgagggggcgtgccggcggggggcgagccgaggcgccggcgggagttgggggctggaggggtgtgggaaggcgctggggaggctgtggctgtggggacggcgatcggggttcggagagaccggccggagggggtgcgagggctcggggccagcgccccagcgcgcagccctcggcgggggagggagccgtctgcaggaccctggcatccggtcccccagcctccgccctcccctgggaccccgcggcctcccgcccacggcttttcccagccctgcccctcgccctccgctccagctggagcccaaacgttcccaggatccctaagcctccggccccagacaaacgggactcgcagcttctgcgcctcctgctccgctcactcttctttgtctcagcctttccatctttttcgccaggttctctctccttgtccccttctttctgtcactttgtgcctcccccattagttactcccaggggcccctccctggatttacaccacgctcctaattcccagcccccatctgtgagtctgggcggcggagaggcccatggggtcctgatatccaagaaggggctctttctgcaggactctgctgggccgctcagccatgcctgagggagcccaaggactgagcctctccaaacctagcccaagcctcgggtgtggccgaagaggtgaagtgtgtgactgtggcaccgtgtgtgagactcggacaggtgagcctagaggcaggggcggcggagcctgtggggcttttattccttggcaatgctgtcaaggcagggtgatggagacaaccccaggccaactcgcacaaagctccgagtctggtggggaaggcgggcccatccccaggcaatgacaggccagagggggcagcgctgggcagagtggtcagggctgtgatcgtggatcctctgagctcggaaggtcaggggaaggttcctggaggtgggaacatctcaactgggaagtggaagattagggggaaggagttgcgcaaagacaaggaagagtattctacatgcaaggaacagcatgtgcaaaggcccagcggtgagaaaaggctgcatgtaagtgactgaaagaagttgagtgtcactggcatccagagtgtaagaagaggggtggctgtgggaagagaactggctagagggatctgtgttggccacattgcccagtgccctgtggatctgaggagtttggactttatccccaggggcatgaaggggttacactcacgggagtaatacagtcagatagacaaattaataaatgtctacctagctgattcatggaggtggattagagaaatggaggccagaagtccagagaggaccctgatgggagaggatgggactggaccaagacagggcagtggggagaggaggaaggagcctgtgggaaagctgttggacaggtgtgggtgagggtgtgggctgaacgcatgaaaggctgtggaagtccgtgcatggggagatttctctgacctcctgttccacaccccagcagctcctgcagcccccaccatggcctccccccgaggttctgggagctccacatccctgagcacagtgggctctgagggggatccagcccctgggcccactccagcctgctcagcctccaggccagagccccttccagggcctcccatccgcctacatctctctccggtggggatcccaggttcagccagaccctcaaggctggagcgtgtggcccgggagatcgtggagacagaacgggcctatgtcagggacctccgcagcatcgtggaggtaaggcgggcagacaccagagggcagtgggtacccaggccagccccttggcccccataaccccagtcatcccaacaggactacctgggccctctgctggacggcggggtcctggggctgagcgtggagcaggtgggcacgctgtttgccaacattgaggacatctacgagttcagcaggtcaggggcaggggggacaggcagggggcattgattggttggagggtctatttcctaatccaaacctcggagcttcgtagtgtcctgtccaggctggtacgtggggttgtgacattgggcaaggatcagggatcacgactgggagggaggaccccgagtgagggaggggcataggggatgggaggaccccgagtgagggaggggcatagcggatgggaggaccccgagtgagggaggggcatagcggatgggaggaccccgagtgagggaggggcatagcggatgggagtcagaggacctggatgaagcccaaacactgggacagggtcccggcatcaggacgagtccttggggctgtgtcaggtctgggctcacgatgaatccaagaatcatatggggcctgaaggccgagacagcgtgagcatgcgagtgaccccctaagcctgatttgcctgggacttttccagttttagcactgaaagccctcgtcctaggaaactgctcagtcccggacaaaccaggatggttggtcactgtggtaaggaggactctggggtccaaggatcatgacatttccaagtaccttgacgaggtctcgggattacagcaggaacttaagatcatcctagctctttgggtcatgatataacacccctaggctcatgccagcactgacacaagttcaagctgaggaatgagaagctgtccagggacaaagtctaagcaggttaccatgccccgtgtagccctcagaggacccttcctccggacatgacatccccttaggagatgctggcagtcagcaagcccccagccccagcagaccattggggcctcagcctcctggaggcctcccatggaggggtcgtgaaggcaggcggttcctcaccctcccctctcccctgtagcgagctcctggaggacttggagaacagcagcagcgccgggggtattgccgagtgcttcgtgcagagggtgagtggaggggtggggggctctcggtcctggatggggcctttgtagaggggggagagcaggcttgggctaggctggaaggggggtcgtgggaagccaggacctggggtctccctgactcccatgtcacccgcagagcgaggattttgacatctacacattgtactgcatgaactacccgaggtgaggggcaggagcccctgctgggcctcaggctgtgcccacaagctgatgtgccagtcacccgtcaccctccctctacccccgacccatccagcaccgacccctgccaggctgtgacagtaactgacctctccctcactgccccgccccctgtcagaccctgacccttcccaaaccctggcccctccctaacccctcttgaccccgcccactggaactgacaatccccactgacctgtgctgtgcccccagctccctggccctgctccgggagctgtcgttgtctccgccagcagccctgtggctgcaggagcgccaggcccagcttcgccactcgctgcccctgcagagcttcctgctgaaacctgtccagcgcattctcaagtaccatctgctgctgcaggtcagctggggcccctggagccaggctggggagggggaggtcctgtcccttgaccacctgttggttcatctggaggatggaccccccacgagttgggcaaggcctcccaaagtgctgggattacaggcgtgagccaccgcgcacagccctagcttttttttttccctttgaggtggagtttcactcttgtcgatgaggctggagtacagtggtgcgatcttggctcactgcaacctccacctcctgggttcaagtgattctccttgctcagcctcctgagtagctaggattacaggcgcacaccaccatgcccagctaatttttgtatttttaatagggacggggtttcactacgttggccgggctagtctcgaactcctggcctcaggtgatttgcccacctcagcctcccaaagtgctgggattacagacatgagccactgcgcctggcctctgcccctatctttatatttctccatctcctgttattctcattctctttctccttctctgtttctctccccatccctgcgtgcctggtggctgcctgacaggaactagggaagcactgggcggagggcccaggcactgggggtcgcgagatggtggaggaagctattgtgtccatgacagcggttgcctggtacatcaacgacatgaagcgcaagcaggagcatgcagcgcgcctccaggtggccccagggtgggctggggcttgctggatgagggagtgagcgagggggccttggggcgggtggggggaaatcagtgcctcagaggtagccttggagggttggctgggacagcatggccctgttgctaaccccctgttttggtgtgtatgtgtgtgccacctacccatgcttgtctctgcgccccggcgcacctggcggggtcccggcaggaagtgcagcggcggctgggtggctggaccggaccagagctcagtgcttttggggaactggtgttggagggcgcgttccgaggaggcggagggggtggcccccggctacgagggggtgagcggctgctcttcctgttctctcggatgctgctggtggccaagcgcagggggctggagtacacctacaaaggccacatcttcgtgagtttggggatggggtggggctagaatactacctacaaagtatatcccatatacctgtatctgtgtgcccggcagtgtgggccaggggaccctgccacattttcttgagttagagaatggaagccaagggaagctttctttctagtgtatagaatgagagctgccccacttaagaaaaaaaaggagaaggctgggcgtggtggctcattcctgtaatccgagcactttgggaggtcaaggcgggcggatcacttgaggtcaggagttcgagaccagcctagccaacgtggtgaaaccccgtctctactaaaaatacaaaaattagctggacgtggtggcaagtgcctgtaatcccagctactggggaggctgaggcaggagaattacttgaacccaggaggcggaggttgcaataagccaagatcatgccactgcactccagcctgggtgacagagcaagactctgtctcaaaaaaaaaaaagggagaggaaacccaccatacagccttatgggatgcatcttcctagggaggaggacccagatacacctccaagggtgtctccgtacaaggggcatcactgagcccaaggactctgagcttgctacccctctctttccttccagtgctgcaacctgagcgtgagcgagagtccccgagaccctctagggttcaaggtgtctgatctgaccattcccaagcacagacacctgctccaggtgagcatgtagtgggatcaggctggcagggatcccccagcctcgagacctcacacctggccccctgactctactccaacccactcctaggccaagaaccaagaagagaagaggctgtggattcactgtctccagcgcctcttctttgagaaccaccctgcctccatccctgccaaggtacagctcctgccgcagccgggggccctctgagtgctggagacaccctcccccaatagtactaagagacgcccctgcccaatgccagagcagtctgttataatgtgattgctaaaagtgcagaattccgctacttgggtttgaatcttagctctaccatgtccctgctttgtgaccttgggcaagtaacttaacctctctgagccttaacttcctcacctagaggaatgaaagcgccttcatcctagggttgtggtgatgagtaatggtcaccagccacgtcatgggcttgaccaatagaagcacccatcagctggctgtggtggctcatgcctataatcccagcacttcgagggggtgatgtgggaggatcatttaagcccgggagttcgataccagcttgggcaacatagtgagaccctgtctctaaaaaacattttttaattagctggggctggccaggcacggtggctcacacctgtaatcccaacactttgggagaccaaggcgggcggatcacctgaggtcaggagttcaagagcagcctgaccgacatggagaaaccccatctctactaaaaaatacaaaattaggccgggcgcggtggctcatgcctgtaatcccagcactttgggaggccgaggcgggcggatcacgaggtccggagatcgagaccatcctggctaacatggtgaaaccccatctctaccaaaaatacaaaaaattagccaggcgtggtggcaggtgcccgtagtcccagctactcgggaggctgaggcaggagaatggcgtgaacccaggaggcaagagcttgcagtgagcctaggttgcgtcactgcgctctccagactgggcaacagagtgagcctctgtctcaaaaaaaaaaaagaaaaagaaaaattagctgggcatggtggcgcatgcctgtaatcccagctactagggaggctgaggcaggagaatcacttgtacctgggaggcggaacttgcggtgagccgagatcatgccattgcactccagcctgggcaagaagagcgaaactccgtctcaaaaaaataaaaataaaatagctgggctggacgtggtggttcacgcctgtaatcccagcacttcgggaggccaaggcgggtggatcacctgaggttaggagttcaagaccagcctggtcaacatggtgaaaccccgtctctactaaaaacacaaaaattaccgggtgtggtagcgggcacctgtaatcccagcaactcaagaggctgaggcaggagaatcgcttgaacccaggaggcagagggtgcagtgagccgaaatcgcgcctttgcactccaacctcggcaacaagagcaaaatctccgtctcaaaaaaaaaaaaaaattagctggatgtgatggtgcacatatgaaatcccagctactcaggagggtgaggtgggaagatcgcttgatcccagaagtagaggctggagtgagctatgattgcaccactgtactccaacctggcgtatagagcaagatctaaaaacaaaaacagcacccattaatgggcatgactacggtgcttaaagtatcctctctgtggtactccaagatcgacccacctcagccctcatcctcctgtctttcaggcaaagcaagttctccttgaaaacagcctgcattgtgagttggggccttgggctgggagggtgtggaagtagacgaattacttccaagaaaaagttggcttttagccccaaaactctccccacaggtgcccccaaaagtaagcctgtcctagagcccctgacacccccacttgggtctcctcgacctcgagatgctagaagttttacccctgggcgaaggaacacaggtaaaggcggtggatccctgagtcccagccctcagccccacttccctaggacccgggagctgggctcacacagggctctggccctccctcccacagctccatctcctgggccctctgtgattcgccgaggccgcaggcagtctggtgagcactcacccctaagggtgatccaggcatcggggtgggagctgggctcctgacatcactgtgtcctccccgcagagccggtgaaggacccttatgtcatgttcccacagaacggtcagtgactgccccggttcagcctggtccatccctgtctgtcgcccggtgggatgtctggggcgggttggggaggggtggttgcttcagctcatcagttatgggggaatcactctttttcccttacatctcactaatgcttctctctctctcatctctccatccttagctaagcctggattcaaggtaagagatatctcgagatagggtctgggcaccttgacttctgggtctgatggagaagggagcttgagttccaaaatcctgggtctgaatgagaaggggattggggccagacagagtaactcatgcctgtaatctcagtattttgggaggtcaaggcaggaggattgctcgagcccaggagtttgagaccagtctgggcaacatggcaaaaccccatctctacaaaaagtacaaaaaaattagccaggcacactagtgcatgcccatagtcccagctactcaggagactgaggtgggaggattgcttgagcctgggaggcagaggttgcaaaatgagctgggacacaccactgcactccagcatgggtcacagtgagaccctgtctcaaataaataaataaaaattttaagagaaaaataaaaaaatttaaaaattgagccaggtacggtggctcacctgtaatcccagcactttgggaggccgaggtaggtggatcatctgagatcaggaatttgagaccaggctggccaacaaggagaaaccccgactctactaaaaatacaaaaattagctggacattgtggcaggcgcctgtaatcccagctactcaggaggctgaggcagcagaatcgcttgaacccgggaggcggagattgcagtgagcagagatggcgccattgcactgcaggctgggcgacagagcgagactccatctcaaaacaaacaaacgcaaaagaaggggattgggacttggggtcctctatgtgagggaggagtcttggctcttgccttccattgctttccctcctcacagcacgctggcagcgaaggggaactctaccctccagaatctcagccaccagtttcaggctctgcaccccctgaggacctggaggatgctggacccccaacactggacccctctgggacctcaatcactgaagaaatcctggaactgctgaatcagcgaggccttcgagatccaggggtgagctggctgtcccatcatggtgtccttgggcctctgggtgtgggcacacagaccagggaccagataggccagcccatgctgatacctttattttttttttatttgagatggagtcttgctctgttgccgaggctggagtgcagtggcgccatctcggctcactgcaagctctgcctcccaggttcaagcgattctcctgcctcagcctcctgagtagctgggactacaggcacccgccaacacacccggctaattttttttttttttttgtatttttagtagagacagggtttcactatgttggccaggctggtctcgaactcgtaacctcaagtgacccgcccacttcagcctcccaaagtgctgggattacaggcgtgagccaccacacccagctaccatgctgatatgtttggcttgttctcctgtgcccactatagccgtccacccatgacattcccaagttccccggagactcccaggtgcctggcgacagcgaaaccctcacattccaagccctgcccagccgggactcttcagaagaggaggaggaggaagaggaagggctggagatggatgaacgggggccttccccactccacgtcctggaagggctcgaaagttccattgcagctgaaatgcccagcattccctgccttaccaaaattcctgacgtgcccaaccttcctgaaattcccagccgctgtgaaattcccgaaggttctcgccttcctagtctctctgacatttccgatgtttttgagatgccctgccttccagccatacctagtgtccccaacacccccagtctgtctagcactcccaccctctcctgtgactcctggctccaagggcctctgcaggaaccagctgaggctccagccaccaggagagaactgttttctgggagcaatcctgggaaactgggagagccgccttcaggaggcaaggcagggccagaggaggatgaagaaggggtatcattcacagacttccagccccaggatgtcacccaacatcagggattcccagatgagctggcattccgctcttgctcagaaatccggagcgcctggcaggcattggaacagggacagctggcccggccaggcttcccagagccactgctgatcctggaggattcggatctgggtggagacagcgggagcgggaaggcaggagccccgagttcagaaaggacggcgtcccgagtgcgagagctggcccggctttacagcgagcggatccagcagatgcagcgggcggagactcgggcatcagccaatgccccgcgccgccggcctcgggttctggcccaaccccagccatccccctgtctgccccaggagcaggcagagccaggtgaggtccgggtacgtggttggcagaggtggtccccgctggagtagtggtcctgactcgatcctcttttcgcattcagggctcctgcctgcctttggacacgtgctggtatgtgagctggccttcccactgacatgtgcccaggagtctgtccccctgggtcctgctgtctgggttcaagctgccatacctttgtcaaagcagggaggcagcccggatggccagggtctacatgtttccaatttgcctaagcaagaccttccgggcatccacgtttcagctgctacccttttgcctgagcaaggaggttcccggcatgtccaggctccagccgccacacctttgcccaagcaagaaggccccctgcacctccaggtgccggctcttacaactttctctgatcaaggccacccagaaatccaagttccagccaccactcctttgcctgagcatagaagtcacatggttataccagctccatccaccgccttttgtcctgagcagggacactgtgcggacatccacgttcccaccactccagctttgcccaaggagatttgttctgatttcacagtttcagtcaccacccctgtgcccaagcaagaaggtcacctagacagcgagagcccaaccaatatcccactgacaaagcaaggaggttccagggatgttcagggcccagaccctgtctgcagtcaacccatccagcctttgtcttggcatggaagcagcctggatccccagggcccaggcgacaccctaccacccttgccatgtcacctcccagaccttcagattccaggtacctcacctttgcctgcacatggaagccacctggaccatcggatcccagccaacgccccactgtctttgtcccaggagctcccagacactcaggttccagctaccacacctttgcccctgccacaagtcctcacagacatctgggtccaagccctcccaacttcacccaagcagggaagcctcccagacatccagggtccagcggctgcacctccacttccggagccaagccttacagatacacaggtccaaaaactcacaccttcgttggagcagaagagcctcatagatgcccatgttccagctgccacacctttacctgagagaggaggctctctagacattcagggcctctcacccaccccagttcagaccaccatggttttgtccaaaccaggaggctccttagcctctcacgttgccaggttggagtcttcagacttgacgccacctcatagtcccccaccttccagccgtcagctcctgggccccaatgcagctgccctctccagatacctggcagcctcatatatcagccagagcctggctcggcggcaggggcctgggggaggggcccccgcagcctcccggggctcctggtcctctgctcccacgtcacgggcatcttcgccgcccccccagccccagccaccacctcccccagccaggcggctcagctatgccacgacggttaacatccacgtgggcgggggtgggcggctgcggccagccaaggcccaggtccggttgaaccaccctgctctcttggcctccacacaggaatctatgggccttcacagggcccagggggctcctgatgcccccttccacatgtgagccaggacatgaggcttccctgaagcaaggatttcagccagatgccatagaccctcagaacttgacctggaagtccagacactgaacgcaggcctcaaaactgctgcggccttccaactcctggtatctgcatcggcgaatggcccttcttgccttgatccacagggatggggaagggaggaatgtcattaatgttttgttaatactgattctttcatgcaatgatgtgtattttcccattctggaggctgtgggagatgacaagacaatgaatgggaaggtctgacacagaacaaatcagcggttctgaaagcttggggaatctcagactcctttgagaattattggaaaatggacccactataacttggcgtgtgtgtgaactgcttgatgcccatccaggaaagccaagttaagaagctttgcttcaagtagacactagaaatccattcccttggcaatttatacagttcacgtctcccaccatccgttcatctcacccaccctgccatctctccacctatccatctggctattgctccatctagctttcccgctccatctacccatcttccaatccatcatctcacgtatctgccttgcttatccaactgtctgccttattcacccacccatccctttatcattctaaccccatctggcattccatccctccatttatccatcttcccacttacccatcttctccatccagcactccgttcatcagtccgtctctccctccatatttccatctgtccattcatccactcattttgccatccatacatattcacccagccatctcccaatccatcgacataccccatccctccctcactggactctccggggtcttagtactatgatacttcagagacaattccatgctgatacgggggagatcaattttggggctctgggataagtctgtcccacatctgtctgatttcccttggcatccttcccgtcagttcctcttgaatatcccagttcttgtacccactcacatacctcagatcccttcactcctccccgcagtttgcagcctctacaattcatccacatgctccctcccccagcaaaataattcaggtcgtggagacaaaaggcttttatgttaggttctgtctgcccccttgttccagcagtggtatgcccagtgagaggcacaatttaaacggtttctttggtgatgatattagctactttcatcaaatacttagcctcttgtgctttagcacattatttatgtaagctcccctaggattctctgaagcaccctggtgtcctggctgtgaattcaagtcccatctttacttatttggtgtgggtcctccctctgagccggttttctcatctacaaaatgaagacaacagtacttccctcctgggatcattgaaagatttagggagcatatccttccacttcccaaacatatttgaacctctgacttgcttaggagcatcattcaaatcacagatcccccagtatctagtcccaacctattgaatcaggatccccagggaaggaggagcttgggaatctgatttttttttttttttttagataaagtctcactctgtcacccaggcttgagtgcagtggcaaaatcttggctcattgcaacctccacctcctgggttcaagcaattctcatgcctcagcttcccgacatagctgggattataggcgtgcaccaccatgcccagctaatttttcgttgttgttgttgttgttttgtttttgagacagagtctcgctctgttgcccaggctggagtacagtggcacgatcttggctcactgcaagctccgcttcccgggttcacgccattctcctgcctcagcctcccgagtagctgggaccacaggtgcccgccaccacgcccggctaatttttttggtatttttagtagagacggggttttaccatgttagccaggatggtctcgatctcctgacctcgtgatcctcccgcctcggcctcccaaagtgctggcattacaggcgtgagccatcattcctggctgggaatccgaatttttttttttttttagacggagtttcgctcttgttgcccaggctggagttcaatagcatgatctcggctcactgcaacctctgcctcccaggttcaagtgattctcctgcctctagctgggattgcaggcgcccacgaccacgcccagctaatttttgtattttgtagtagagacgggatttcgccatattggccaggccatagtggtcttggactcctgacctcaggtgatccgcccacctcggcctcccaaagtgttgggtttacaggcgtgagctaccataccctgcccaggaatctgaatttttagcaatcagttagcagcaaataagctgagatttcctgggtactaagcacatactatgagcattacagccgctttatataagctcgttcactgtcctcattacattcctaatatgcaagtgagcatgttttttaatcctcagtctagaggtgaggaaactgaggcaggcacagagaggctaagggatttgcctagtcgcacagctaggaaggtgcagcactgagactcgaatccacacagcttggcttaagtctaccattaaatttgcctgtcctggccaggtgcggtggctcacgcctgtaatcccaacacttcgtgaggccaaggcaggtggatcacttgaagtgaggagttcgagaccacaccagcctggccaacatggtgaaatcccgtctttactaaaaatacaaaaaattagctgggcgtggtggtgggtgccggtaatcctagctactcaggaggctgaggcaggagaatcacttgaacctgggaggtggaggttgcagtgaaccgagattgcgccactagactccagcctgggagacgagcaaaactgtctcaaaaaaataaaatgaaatacataaataaatgtgcctatcctgtgccgggtgctgttcttgccagtggggatacatgagagaacactgccttgcccgcatgaggcttgtggcctggtactgtgcacacctcaggggattctgataattagctgagcacagttgccagcacagggcctggctcaataaatattagctgctggcttctgctcacttactgtttattgactggctactgtacaccagggccgaggctgtgtcccgggggccccgtggtgacggaggtgaactcctcagcctggagtgatccactccactggagcctccccaaggtcaggaccgcagccgacgctcccctcctccgccccagctgcacattcccggctgaaggaaagttctcagcctggcccaggctcccagcggcgtcggaattcccggtattcgaggaggcagggagggagaaggggcctgtctactccaaggcctggagctgggaaggagaggcaagcccctttccagtccagatgtgtcccagctgtgcctctgggaaagagccaggagcctcaataagggggtctctggaccccctgggaaaaccatgggcgccaggcttgcctccacccctcctcctggcatctgtgaattccattcctccctcccgcccaactcctactgctgcttcccagccccagctctgtcgccttctcaggaatacctttcctgctggcctaccttggttctgagcccagtcctcctcagagctacagctaaatcaggctccgaaaggataaggatggtgcctgctgtcctctctgggacatttaggttaatgccagctaaaccagttaaccggagttaactctggctgcgatgcaaaacttggcgagccgcaaaacattttgccactagggtagttttctcatcctgtgtcaccaacctcacagggatgtggccacctccaacaaccacctacctgatgctccatgaaccccactcctttactttttctttttttttctttttttgaggaggagtcttgctctgtcgcccagagctgaagtgcagtggcgcaatgtcagctcactgcaacctctacctcctgggttcaagcgattctcctgcctcagcctccagagtagctgggactacaggcacgtgccactatgctcagctaattttgtacttttagtagagacagggtttcactgtgttggccaggctagtctcgaactcctgacctcaagtgatctgcctgcctctgcctcccaaagcgctgggattacaagaacgagttgctgcgcccggccccccactcctttactttttattttatttatttatttatttgagacggagtctccctatgttgcccaggctggagtgcagtggtgcgatcttggctcactgcaacctctgccgctggagttcagtggtgcgatcttggctcactgcaacctctgccgctggagttcaatggtgcgatcttggctcactgcaacctctgcctctggggttcaagtgattctcctgcctcagcctcccaagtagctgggattgcaggcgagtgccaccacgcccagctaatttttttgtatttttggtagaaacagggtttcaccatgttggccaggctggtctcaaactccagacctcgtgatccacccacctcggcctcctaaagtgctgggattacaggcatgagccaccgtgcctggccttttttcttttttgagacggacccttgctctgtggctcaggttggagtgcagcggcaaggtctcagctcactgcaacctctacctccagggttcaagcaattttcctgtctcagcctcctgagtagctgggactacaggcacacgccaccacacccagatagtttttgtatttttagtaaagacggggtttcaccatattggtcaggctggtctccaactcctgacctcaggtgatccacccgccttggcctcccaaagtgctgcgattacagatgtgagccaccacgcctggcttttttttttttttttttttgaggcggagtctcgctctgtcgtccaggccagagtacagtggtgcaatctctcagctcactgcaacctccacctcccgggttcaagccattctcctgcctcagcctcccaaacagctgggacgacaggcacccgccaccatgcccagcctttttttttttttttgtatttttagtagagaccaggtttcgccatgctggcaaggctggtctcgaactcctgacctcaagccatccacctgccttggcctcccaaagtgctgggattacaggcgtgagccactgggcccagcccccgactcattttatgtatcctgtgtcagtgctgtcccatataaccttccttgatgacggaaatgttctaatatgtgcagccccgcttggtagccatacatggcttctgagcactggctactgtattaactagggtagatacatagaaagtgggcaagtggacagaaaatctcaagttgtaaaacattccccctgagcatttaggtgcgggacttccctattggctgcagaggctggaactaggaagtagaaatctctgcgctccccaaacaatgaagttcactcgcttcctatgagtcattagccactcaacgaagtcctcacttaacgtcatcaataggttctgggaaaccgtgaccttaagcgaaacgacgtataaggaaaccagtttgtttaaaggactgttattacaggatctgcttgttttgcttaagtccgtttccaagcacctatacaaaacgctgaggatgcactgtgctttgaagcccaactcctcttccagcaccggcagcaacccttgcgtcatttgtgactccttgggagggggaagagggctgtggtcactcagtgccccatgacgagcacatggcccggcacaggtgttcaaggaaagtgaatgagcaagttgaggccacagacacccgaaaacaactcatcacagacatggtctccctggctactcttcctaccggccagcagaccctggttcccatgtcctctcccccaaggagtccacctgactcctccaggctgtcaggcaccgcttgagtcccacagcctcttgtgcttttcccacaagcggccaccctgactccttagctcctcatgttgaggggccacagggtagagatggggcctcttgagcagatctgtgacaacctaaactagtagtcaagaacctgggctctaggtcgggcgcggtggctcacgcctgttaatcccagcacttcgagaggccaaggcagggggatctacctgaggtcaggagttcaagatcagcctggataacatagtgaaacccacgtctctactaaaaatacaaaaatcagtcaggtgtggtggcacttgcctgtagtcccagctactcaggaggctgaggcagaattgcttgaacccggaaggcggaggttgcagtgagctgagattgtgcagctacactccagcctgggtgacagagcaagactccgtctccaaaaaaaaaaaaggcgggggggggggggcaggtgtggcggctcacacttgtaatcccagcactttgggaggccatggcgggtagattacctgaggtcaggagttccagaccagcctggccaacgtggtgaaaccgtctctactaaaaatagaacaattagctgggcaaggtggcaggcgcctgtaatcccagctactcgggaggctgagacaggagaattgcttgaacccgggaggcggaggttgcggtgagccgagatcacgccattgcactccagccagggatacaagagcaaaactctgtctcaaaaaaaagaaaaagaaaaaaaaagaacctggggtcttccacagcccggttacctgtccaaaatgccactttgggctcggcatggtggctcatgcctgtaatcccagcactttgggaggctgtggcaggaggatcacttgaggttaggagttcaagaccagccttgccaacatggtgaaaccccatctctactaaaaatacaaaaattaggctgggtgcagtggctcacgcctataatcccagcgctttaggaggcagagtcgggtgatcacttgaggtcaggatttcaagaccaaccttgccaacatgttgaaaccctgtctctacttaaaaaaaaaaaaattagctgggtgtggcaggcgcctgttcaagcaattctttccttcagcctcccaagtagctggattacaggcgcctgccaccatacctaatttttgtacttttaatagagatgaggtttcaccatcttggccaggctgatctttaactcctgaccttgtaatccaccagccttggcctctcagagtgatgggattacagtcgtgagccaccgtgcccgactctccttgttttctttgtattaaagattattggctaggcatggtagctcacacctgtaacctggacacattgggaagatgaggcaggaggattgcctgaggtcaggagaccacgcctgggcaacatagtgagacctgtctctacaaaaacaaaaattcagctgggggtggtggctctcgcctgtaatcccagcactttgggaggcccgggaaggcggatcacttgaggtcaggagtttgagaccagcctgaccaacacagtgaaacccatcgatactaaaaatacaaaattagcatggcgtggtggtgggtacctgtaatccaagctatttgggaggctgggcttgaaaaaaatagacatccacaaggatgagccatatatccgccaaggtctgcagccactaatggccccaaacgactgccatctcagctttgcctgcacactggactctactggaggtgtagagacagagaccccctgccttctgcttccactcacccacaccaagcccagcgcgaccacttctggggagggtcaaaatccagactggcaataggtccaggatgtttactgatttctgtctggttaaacatccaataccaacacataaggccacacacagttcttgaaactttaaaatccctcaaaaactgtttattatacaagtgagttttgagtcacgatgggcttatcggtaggatttctggtagcgagcgcgggcaccagggcctccaaactttttggactcgcagcgacgagggtcagctaccagcagggtccggtcatactggatgaggatgtctttgatctccttcttggaagcctcatccacatctggcaagaagagcagggacgaggatttagataatcacacagagtccttgacttgatccccacacacccatctacctcatgggaaggacccatgctcactcacatttctggtaataggccaccagggctttggagatggactgacggatagctgtgagaaagacacacaattaaagggtacaggagcgctgtgaaggcctccctcccagagccacctcctccatgcgcccagttcctgggactcaccataaatctgggccacgtgaccaccaccctttacacggacacggatgtctacaccagcaaatcgctccttgccgagaagcagaactggctccagcagctaaaggaatggggaatgaacagggatttaagttacatgctgggcagcttagccatctcactgggcttcttgtttctgtggcttctgccaccactggccttcaagtactagtggatgggggtcagggtgtcactccaaggccctctacagacccagagaagaggaaagtcaaaaaagccagatatgagactgctgaagtggtgttaagaaatataggcaaggtaaagggaacaagatctgggctccctcctacttgtgtccctcactggacctcagacaccctacctctaagactggttcttagaaggctgaacagtaaggagcattccaatagcttctgaaactcccaaggctgtttcaagtagtcgaaagccatccctggactgttcaggtgccttttctatttcccacctgagctctctgccctttctttgagcctcacaggtttccagaattacagtacaacctgtccctggtccctagacccttcccagctccaggtcttttaccagtgcctctgtctggatacttcctttacctgctttcagctcacaggtctccttccccagttctgaccactttggatcagcttctggtattgggcccagtccttctccccaactaggctggcaggtccatgaaggcaagaccttaagtcatctggatcactgctatgtccccaaaactcaacagagggtacacatacaaatccttcaaatacagtgacagccaataacagtaacattcaacatctgctacacaaaggaaatctcagaatttttattaaattctaggccaggcatggtgatcacacctgtaatcccagtccaggcagaaggatcacatgagaccaaggaccagcctgggcaataaagtgagaccccacgtctacagaaaaatatttctcaaatgagccaggcgtggtgatgtgcctgtagtcttggcaaccgaaaggctgaggtgggaggatctccaactcaggagtttaaggctgcagttcattaggattgtgctattgcactccagggtaggtgacagcaagatactgtttttaaaaaagaaccttataactcaaaaaaaatttttttaactgaccctgcaatgtagatattctttcttttaaaagtagtagagttcagaaggggcagaaatcagactctggtttctttccattctgagccaaagaaattgagagtcccaaaaagggaacagaggaaccccttttacaagcaagcatttaaacagacccaaattcggccgcacacggtggctgacgcctgcaatcccagcacttcgggaggccgaggctggtggatcacctgaggtaatgagttcgagaccactctggccaatatggcgaaaccccgtctctactaaaaatacaaaaattagccgggcgtggtggtgcatgcctgtaatctcagctactcaagaggctgaggcaggagaatcgctttaacccgggaggcgaaggttgcagtgatccgagatcgcgccactacactccagcctgggcgacacagcgagactccctctcaaaacaaataaataaaataaaaaatagtcggtgtcccttcaccctttgggtccccccgccccagtgaggtgagcttcctaacatcccagttctcaaagcaaacccttaatcttcaacaaccccatctcagcttttacatcttctgaaccccaagcccagctctattgccaaataccccactgttctacacccaacacaacttctaaacatcccgttgctgatgccagcccccccagctttcaagagctacaacatctctgtctccaagagtcctccatccactcaacgccggtgccggatcccagcaccttgtactgtagcgtgcgcggctcaatcatctccaggggccgcccgttcaccttgatgagaccattgccgcgtttgcagtgcgccacagctgtcgctgtcttctgtaagatacaagagaaacaggggccccgtgagctccggctccagctcccatgttaccccctagattcctgcccaccgacctctcccagaccctggccttctccttcccctccccttcccatccggcgtctggctcaccttgcgtccgaagacctgcacagactgcagcgggcccttggacggcatggctccgagcgtggactagacaacctcaccgcgcggcgccgcaaccggaaaaggaaagctaggggccaccctggccgcttttcagggtctgcgcaggcgccttgagcactgcgtcgcgacgggagagagctttacggcttctgttgcggctaacgggcggggcgtctggtcagcggcgggaaggcccttaggcgctcagagcgggcgggccctgtgaggcggaagtggcgggctctgtgggcggaaggggcggggcctgggagtgtcgtgtgcggactgaagggaaggctgcgggagtgtgcttcgcgtcctctgtagtcgactaccgcagctcttctttgcattctggctctttaataatctcccttcgccctttctttaaatcagttcccaccctcccaacacctgtaatctttctcccctctggactccctcctccccgaatcccccgcatcagaatcttcctttggaatctactgcaagaaatctggctggattctcagattaaggacttccagaatcctatcctccctagaatccccctccttggggatcctctcccagaatccttttcccctcagagccccttcccctcagaatctccctttcaccagaatgtccttcctttcagtttcctcttcccagaatgtttcccatccttctctcagatggccaaccccaaatgtccctcttaagagtgctcaacttagaccccccttttccctgaatctccctccattcggtcctcgtcccctcagtcacccttcccagaatctttctcttgtcaggacccagtacccctggaatctccctcctccagaatctccctttcccggcaaatccccctttcccggcaaatccccctttcccagaacaccccgccccgcaaatccacaaaaacttttctctcagagacccgtccctcaaaatctacctttctcctgagtttatttcccttccgagactcctcttcccagcaactgccttccctggagttttccctccgttagaatccccctctcctaagagaccctcccccaagaattaacctcttccccgtccccaccctagaatctctctcttttttttgagacggagtttcgctcgttgccctggctagagtgcagtggtgcgatctcgtctcactgcaacctccgcctcccgggttcaagagattctcctgccttaggctcccgagtagctggaattacaggcgtctaccaccacgccctggtcgttttttgtatttttagtagaaatggggtttcaccacgttggccaggctggtctcgaactcctgacctcaggtgatgtgatccgcctcagcctcccagagtcctgggattacaggcgtgagccaccacgcccggccgaatctctctgttttttgttttttttttttcttttttttgagacagagtcctgctctgtcgcccaggctggagtgcagtggcatgatctctgctcactgcaacctctgcctccccggttaaagcgattctcctgcctcagcctcttgagtagctgagattacaggcatgcaccaccacgcccggctaatttttgtatttgtagtagagacggggtttcaccatattggccagactggtctcgaactcctgacatcaaatgatccactcatctcagcctcccaaagtgctgggattacaggcgtgagccaccgcgcccagcccctagaatctctttctccagaatctcccagtcatctttttcctctcccccaaatcaccctccacttaagcctcctccccacagaattctccatccccagccccccaaccccacctgaggaaccccaggattgggttgtcctctggttccccggcagatgtccctgcgtctcaccccatcaagagtctccccagcgaagaggttcctctctcagagctagagggagcccacagttgcctcagtttctctggcagtacagggtctgggatccagggttcaaaagggcgtcgtggtgcaccttgccaaagagggtggagacagggagacactggagggcaggtctggggccagagggaaaagccagcccggagtccagctctaaaagggtgaggggggagggggctgttgggagggaggaaggaagtacccagaggctgaccgggagggacacagacacagcccaaagaaatgtaggcacaagtggagaagaagagaaagatgaaaggccaagggagaagaggaggagaaaagggagagaccaggacagtcaagagatggacccccaaaacaagcccagtgacagatttagaggcagagaggccaaccctcagacaaaaaagagataaaggcaggcatgatgtttccaaaatacttgagacagaggccaggtgcagtggctcacacctataatcccagcactttgggaggccaaggcagcaggatcactcgagcccagggttcaagaccagcctggccaacatggtgaaaccccgcctttactaaaaatacaaaaatcagctgggcatggtggcaggtgcctgtatcccagccacaagggaggctgaggcaggagaaccgcttgaacccgggaggcggaggttgcagtgagctgagatgtcgccactgcaccctaggctgggcgccagagcaagactctgtctcaaaaataaataaataaataaactctgtctcaaaaataaataaataaaataaaataaatagagcagagacctcaaatattcacttgcagacacagataaaggctagcacaggtgttttccaatgaagacacaggcagatgagaggatgcacacattctacctgtactttttctttttttttttttaaattgagatagagtctgtgtcacccaggctggaatgcagtgatgcaatctgagctcactgcaacctccacctccccggttcaagtgattgtcctgcttcagactctggagtagctgagattacagattctcctgcttcagactcctgagtagcccagatcacgggcctccaccactatgcttgactaataatttttcttttttttttttgagatggagtatcgctctgtcgcccagactggagggcagtggcttgatctcagctcactgcaacgtcagcttcctgggttcaagcaattctcctgcatcagccttccaagtagctgggattaaaggcatgcaccaccatgcccagctaatttttgtatttattagtagagacagggtttcactatgctgggcagactagtcttgaactcctgacctcaagtgatccacttgcctcggcctcccaaagtgctgggattacaagtgtgagccactgtgcctggccactaatttttgtattttttagtagagacagggttccatcgtgttggccaggctggtcttgaactccttacctcaagtgatccgcccacctcggcctcccaaggttctgggattacaggtgtgagccacagcggttggcctagcctgcactgtcttaagggcctgttgggcaggggagttcaggttctctcgtctctccagattgatcttcacacatttgctaagtctcgtatcgtccctgagcttgggagtcagggagcgctctgacctaagccctcctgactttggggtcaccatctttccccagcctctatgggcacactccctgaattatctgtggcttgagtggagcaagcaggggatgggatgaggggtggcgggggagttcccctcatccacttcagccttccagtctgctcccccttcctgtacctctctcttccagaaccccaggccaagcaccagagaaggcctgggagtgagcaaggtgcccatgttgcttctgtggatcatcctcctgcttgtacagccctgggagggcctaggaacgcccgcccctctgctggagggagcctttttacttccttgcagccctctgaagataccagcgagtggggagcagagccagcagacggggtgggccaattgatggggcgtggtagggggtgtgtttgaggaagggtcagcctctttccctccaagatctgattctcctccttacccctgaactgtaggaaaacaaaaatgatgacaccctctacaccccagatgatctctcagtgagtattgcattcgcttctttctgcagttgcaggttttgagagaattcagtggtctccatgtgtgagggctgctgtgtgaccatatgaatatgttgcggggaggaagtagtgggactatctcctgacccagcccctagccttgacagatatattttgctcactgctgtctccaacacctagaatagggaggtatataataacaaatgatgatgatgactacagctgcatgtaaatagtgtttactctgtgccaggtattggtttaaatgctttaagtatgttagcttatttactctgtacaccaatcctataagatagataggaccaccatgtatggatgtgaatgttgtacactgcacaaggatcccacatctacaaagacagtactatattcacaggctggatattgtagatttgcatatttgccaacttgcggcagatggcagtaaagtatcttgttctaataaaatcaagacttagaaggtagaaggaacttaaggaaggtctttttattttcttttttttgagacagggtcttgctctgtcccctacgctggagtgcagtggcacaatcacagctcactgcagtcttgaccttttaggctcaagcaatcctcccacctcagcctccagagtagctgggaccacatacacgtgacaccacaaatagctaatggctaattttttttttttttttttgagacacagtgttgctctgttgccagctggagtgcagtggcgtgatctctgctcactgcaacctctgcgtcctgggttgaagcaattcttctgcctcagcctcccgagtagctgggactacaggcatgtgccaccatgcccagctaatttttgtatttttagtagagacagggtttcaccatgttggccaggatgttctcgatctcttgacctcgtgatccacctgcctcaacctcccaaagtgctgggattacaggcgtgagccaccgtgcccgacctttttttttttttttttttttttgtagatatggggtgtcgctgtgttgcccaggctggttttggacacctgggctcaagtgatcttcctgccttggcctctcaaagagctgggattacaggcatgagccactgtgcccagctgagtgtctttttctagcttgcacataagtacagcatgggatagtgtcaggccttacggttgggattatccagagccctatttacagatgaggaaactgaggcccagagaactgaaggggtttgttccaggacacagataagaaatcttgggagtggggacttggactcatgcccttacccatagataccaggtcactttgtccctactgtgtgtcctgctgagactctaggctgctccaggttggagctgtctgtgattgggtttgaggagggaccatctatgggaactgctgtgttccagctacagtacctgctggatctcctggggtcccggctgtgggtggccagccagggcccttgcctgtcctgtgaaggacatccccagagacctgtccccctcttggagttactacagggagcttgtgcttggcaccctaccacagcctgagctttggaggacatgggctcccaggtacacccagagaggctgggtagagagagggagggaatagtcttcagctccaactgccaaaccctaagccttttcttccctctaggccagaggaccccacctggagccctagtagccaaggggaagagttaagaaggaggaaagtaaggtgcgatctgaagtctctgacctcttgggcagggagttggataaattgccccacctgcccccattctcaccctcctttagatactcttctctcttcttccaggaagggacagagaagtgcacaggtattctctaacctcatccctataccttgagaacagggagggtcctgtggttcacatccctacatccctggctacaaaaaattaccacttgaagaactttcttttcttttcttttctgtttttgaggcagagtctcactctgttgcccaggctagagtgcagtggcatggtctcagctcgctgcaacctccacctcctgggttcaagtaattctcctgcctcagcctcctgagtaactgggattacaggcacgcgccactacacctgactaatttttgtatttttagtagagatggggtttcacaatgttggtcacgctggtctcgaacgcctgaccttgtgatctgcccacctcagcctcccaaactgctgggattacaggcgtgagccaccgtgcccagcccaccacttggagaactttcaagtaatactgatggccagaccccagcccagataatttgataattggtctctggtgaagcctgagcatctatattatttttattattatttagagacagggtttcactatgctgcacaggctgtaacttggcatctgcccatatatttttttgagacagggtctcactctgtcacccaggctggagtgcagtggcatgatcaaaactcattgcaggctcgatctttcaggctcaagtgactctcccacctcagtcccccaagtagctagcgctataggcgcatgccaccacactcagctaatttttgtattttttgtagagatggggttaccctttattgcccaggctaatcttgaactcctggctcaagcgatactccccccttggcctcccaaagtgctgggattataggcatgagccaccacacctgacattttttttttttttttgagacagagtctccctttgtcacccaggctggagtgcaccggctggtggactggatggccacatttccatcaccccaaagcattccttctctctcttcccagtcaatttccacctccctctccagccccagacatccactaatctgcattgtctgtataggttggttttgcttgctctggagtttcatatgaatggaatcatgctggacatctcctgatgtctggcttctttcactcagcataatgttttggagattcagtcatgggtgtattggtagttgttactattctgttgcatggatggatgtaccaaaatttgtttttcttttgagacgagtctcactctgttgcccaggctggagtgcagtggtgcgatctctgctcactgcaaccttcacctccctggttcaagtgattctcctgcctcagcctcccaagtagctgggattacaggcgtgcgccaccacacctggctattttttttttttttttttttgtatttttagtagagatggggtttcaccatattggccaggctggtcttgaactcctgacttcgtgatccgcctgccttggccttccaaagtgctgggattacaggcgtgagtcactgcgcccggccctaatttttgtgtttccagtttagggctattatgcaactctttctttctaaaatattctcaagtattctgatgtgctaccagagttgagttcagaaccacggatccaccaaggaagaaacttccatggctggggaaatgactgtgccctcttttttctgcagggaatggctttctgcagcagtgtctgtagcgatttaatatgtagaatcctattttcttgttgtttttttttttgagacggagtcttgctcttttgtcacagcaacctccacctctcaagttcaagagattctcctgccacagcctcccgagtagctgggattacgggtgtgcgccactacgccacctggctaatttttgtattttttagtagagacagggttttaccatgttggccaggctggtcttgaactcctgacctcaggtgatccgcctgccttggcctcccaaagtgctgggattacaggcgtgagccaccgcgcccggtggagaatcctttctttttttgagatggagtctagctctgttgcccaggctggagtgcagtagcacgatctcggctcactgcaagctcggcctcccgggttcacgccattctcctgcctcagccttacgtgtagctgggactacaggcgcccgccaccacgcccagctaatttttttttgtatttttagtagagatggggtttcaccgtgttagccaggatggtctcggtctcctgacctcgtgatccacccgcctcggcctcccaaagtgctgggattacagacgtgagccaccgcgcccggcccaggtgtgtcatacttatgtgagaaattttaccaatgtgtcctgaggcttcttttttttttttttttttttgagactgagtctcactctcgcccaggctggagtgcagtggcgcgatctcggctcactgcaagctccgcctcctgggttcacgccattctcctgcctcagcctcccgagtagctagaatcacaggcacatgccaccacgcccggctaatttttttgtatttttagtagagacggggtttcaccatgttggccagactggtttcgaactcctgacctcaggcaatctgcccgccccggcctcccaatgtgttgggattacaggcatgagccaccgcgactgacatagacttctgatttttaaaatttcccctatcaggttaatttttcaatttttaaaaatttaagttttaatttttttttttttttttttttagagacagggtctctattacccagtctggagtgcagtggtgcaatcatagctcactgaagcctcaacatgggttcaagtgatcctcccaccttagcctttggagtagcagggaccacaggcacacgccaccacaccacattaaaaaaaacacaaaaattggatacatggggtctcaatttgttgcccatgctagtctcaaatacctggcctcaggtgatcctcccgcctcagcctcccaaagcgctgggattacaggcgaaggttcatttttcatctctccattacacctgtccactctgccatcactcgtcagccgtcattactaatagataaattcgcctttaaatgaacttaggaagcctggaaagaaaaatagggacttgggccgggcgcggcaggttatgcctgtgatctcagcactttggcaggacgaggccggaggatggctttttagtttgagttagaggagtttgagaccaggccgggcaacagcccgactctaccaaaaaaaaaaaaaaagtacaaaaagaaagaaaaagaaggaaaaaccagggcttcacggtcactcagacttggcgaggaggcttgggtctgccgctttccactgagtttttctgagcttcagcgttctctccaaaacggggatacggatctcctggggatgctttagagggcctaggagataaagccttgtttcttttataatttgctattcgctgatttcgccgcctcctcgcagcttggcctaccgcgctagtgttccggactaacgaacaaacggctcactaaattcaaacatgagtttcagcctggtcgccgagccggcgggtagaaaaaacctttcccctcctaaccctccgcagatgtcggccccgcactccgcccaggccagccctgcctctctcaagatggcgacctggaagtgcgtcgcccgtgccagccccggaaatctcgtgttaggcgaggtcaacgggtaggttctcgcgagaggacccgtcagccccagtcaggcgtcgtgcgaacagcagctggtaccgaaggcggaggtggagcccgagaggtaagtgcgtgtgcagaggtggcagttccgggcgccggggaggtgtagagaacagattcggaaactggggaggtctagcatgtggcgtaggagggggtcctcactccgcttcgcgattgccaaaacgagcctgccggaagcgccctaaggggttttcttctcccagggaaccagcggggaaactgaggctcggggtggagcgcaggattgtgggacgcgccaaggctgctgtctttcccagcagcagcggaagatgtcggacagcgaggacagcaacttttccgaggaggaggacagcgagcgcagcagtgacggcgaggaggccgaggtctgtggctggggcgctgggggagacattgcgtctggggacaggactccgggcagaaaggcccctgtgggaggctcgaggggttcacagcgggctctggcttctgggaactcccagattgtctcaagagatagagaattaggcaagtcgaagtcaagcaaagggacaggttctggaggccagaaatgggtcaggtccagtgagataacaggtgatgttttgaaagtttactctgtgtgcatatagtaagcacttagcattagtttttttttttagttatgtctagtcattccataactatatttgtagtgcctactatgtaccaggcgcaattctttgctcttagggtacaccagtaaacaaaaagattttaaaaatgtctgccttcgggaatgtaaataaatatagccaaggaataaactatatagtaagctggaaggtactctggagaaaagaacagaaaaggggaatggagagtcctggttgctcttgaaatagggtcatcagcatgagtctgaggggtgacatttgagcaaaaacttgttggaggtgagggagtgagtcgtggttagctggaagtgtagtgttccagtgagggggaccagcaggtgcagagatgggagtgtgtccgccgtgttcagggattaacgaggatttgagaggccaagctgggaggatcacttgagcccagaagtttgagagcaatctcggtaacacaacgggaccctgtctctacaaaaatataaaaaccattggctgaggccgggcttggtggctcacacctgtaatctcagcactgtgggaggccaagacagtggatcacctgaggtcaggagttcaagaccagcctggtcaacatggtgaaacaccatttctactaaaaatacaaaaaaattagcttggcatggtggcgcccacctgtaatcccagctactcgggaggctgaagctgagaatcgcttgaaccagggaggtggagactgtggtgagctgagatcgcgccactgcactgcagcctgggcgacgagcaagactccgtcttataaaaatattagctgagcttggtggcacgcttctgtagtcccagctacttgggaggctgaggtgggaagattgcttgagccagaaggtgaaggtctagtgagctgtgatggtgccactgcactgcagcctgggtgacagagtgagactttgtctccccaccaccccctaaaaaaagggggtccactttggttggatcagagtgagtgcaacaaagaatttatgagagccaagtcatataggatcttgaaggctgtggtaaggaatttggtcttaactgagtaaaatgaaaccacgaaaaagtttgagcaagtggaagatgtgatctaatgttttgaaaggatcactctggctttgggtctgttgtacctctgttccaggaaccaaaaaaccaacatttcctggggcatttctgatttcaaatgttcttttatttgccattatcttttttttttttttttttgagacagcatctcactaggttgcacaggttggagtgcagtggcatgatctcagcccactgcaacctcagcctcccgagtagctgggattacaggcatgcaccaccacatcaggctaatttctgtatttttagtagagacggggtttcactgtgttggccaggctggtcttgaactcctgacctcaggtgatccaccctccttggcctcccaaagtactgggattacaggcgtgagccactgcaccaagcccattatccaccttttaaacttatttttgttttatttgtttgttgaacaaatcagtgtttgcatctactactgtgttccacttacttctcaggtgtctggtaggaaatctttgcatttttggagttgacatttagtaggtagcaatcacaaaccagtaaacagatgacagggtgattatagatcccttgtttgatgcacagaaacttaaattggctgttaaattagttgccaatgcttgtgagggagatttaacataaagattaagatttctttttctggggaaatggaaggagctggcaccctgggacacagagttgttctgcagagcagccgtttgcttgatgagtggctgccctacttatacagctgggaattttctccagttcccaggatatgttagttgccatttgtcctcttgcttgccttgtggcagagtgaagaaaaggaaaagatttcatgtggctgtgttctggaaaacgtttggtagatggagagtgctgtgtgtttcgggtgacttgtcccagtcacttatgttgcctgcttatcctctgtggacatttgattgccaatctttattgtgacctttggagagtgcctggcttccaggcttgcagtgaagagttggagaaattgggatgctgtggtgggagagtgacagggagggccttttctctaagctgtagcactggattcttggtctctgattcatggcttggagacactgcttggtggttaaagtcaggtggaaatgagaccaagatccccagttccatttcctgtctgggacattctcgtttgcactgttactagtctcacttccccaacactacaccatacttgaccccccacccccgccgctggctcctcttcagttaccaggtgaggcaagagggcactgtgaggcctgtccccactgccagggacaggattggatggccttttcagacagccaaatgatgacatggtccttgaaggacagggttctgtggctagacaggtagggatggcaaataatgagctacttttgaggggagctgctggttcacccatcatggctccagtaacctgttcatttattcattcaacaaatgttctggctgggtgtggtggctcacgcctgtgatcccagcactttgggaggctgaggtgggtggatcacgaggtcaggagattgagaccatcctggctaacatggtgaaaccccgtctctactaaaaatacaaaaaattagcgtggtggtgggtgcctgtagtccctgctacttgggaggctgaggcaggagaatggcgtgaacgcaggagacagagcttgcagtgagcagagatcgcaccattgcactccagcctgggagacagagcgagactgcatctcaaaaaacaaaaaacaaaaaacaaatgttccttgacttggcatgttggggtcacagtctcccttacagagatctcagtctcaaggcagaggcagttttatagatacacagttactgcaggggatgttgaggacggtgagagcacatccaagccctgaggtgagcagagagtggtgggggcatcctccactgggagggaggagccaggtttggaaagaggcatctctgggacctgtcagaggggaactgatgacaaggttcctagaaatcagcctgtggtcctgtcatagtttgggttgttaaaatgtgcttcatcgtgggctagtcgagatttgtgttaagcaaatatttctgaagtcttctgtgcttggccttgggctgggtgatgttgggggacccagcagtgcctgagatggactgggccctactattgggaggctcacagtggtcagggctgtgatggagggagcccagagaattgtgagcatagaggatgtgcctgactctgcctgggggagagggggcggggatggctgcctggaggaggaaggttagtttggttttttttttttgtcttggtgtcttgctctgtcacccaggctggagtgcagtggcacgatctcagctcactgcagcctccacctcacggtcaagcagttctcctctctcagcttcctgagtagctgggattacagcggtgcgccaccacacctggctgatttttatatttttggtagagatggggtttcaccatgttggccagggtggtctcagaactcctgacctcaagtgatcgcctacctcggcctcccaaagtgctgggattacaggcatgagccaccacgctaagccttttttttttttttttgagacagggtctcactttgtcacccatgctggggtgcagtggtgtgatctcgactcactgcagcctcagcctcctgaggatcaagcaatcctcctgcttcagcctcccaatgaactgggacaacaagattttgccaccatgcctggttaagttttgtatttttggtagagacagggctttgtcagattgtccaggctggtgtcaaactcctgggctcaagtgatccttctaccttggcctcccaaagtgttgggattacaggtgtgagcccccatgcctagctaaggagggaatattttcgttgaagtgtgaatgggaggcacagttttttttttttggagatgaagtctcactctgtcgcccaggctggagtgtagtggcacaatcgcggctcactgcaacctcttccttctgggtttaagtgattctcctgcctcagcctcctgaatagctgggattacaggcgcatgccactgcgcccaggcccagaggggactttttatacagaaaaccagcatggatgatggccagcactgagagagtatggtccaagtagttgagtgcagctgaggcctagtgttggggaggcagtcctgaatggtggggaacggggagaggcagcaggcagagcatgtgcttctagttcaggctggctgaagctgagcaggggaacaaatggtcaggttcatgttttagattacagttttctaagactgtaccatatattctaggttggggatgatgaaaggtgcttttaggtggaataaggacaagaccttaagctacattgaatcatttagtgagaatatttccttttcagttgtgtgtcttatcttgattgggtcatgagaaagtttcatcttagtgctactgtgtcttgaacgcctctgggtgggagaacaggccttaggcttagagcctgcagcaggcagcagtatcttgctgggtcttaataacattgttttgcttttatctttatagttaccttgtgtttatgacaaaccttcaaaaagttttaaattttgaaacattgcataatataaaaatgtttttatttaagaaggtgagtagatttgaagaaaatacacattgagtattatctaaaatgcttgggacaagaagtgtttcagattttggatttttttttttttgattttgtaatatttgctgtggagcgttccctaatctgaaaatccagaatgctccagtgaacatttactttgagcatgacctttttttttttttttttttgagacagagtcttgctgtgtcgcctaggctggagtgcagtggtgcgatcttggctcactgcaacctgtgcctcccaggttcaaacaatcctcctgcctcagcctcccaagtagttgggactacaggcgtgccaccatgcctggctaggtttttttttttttgtatttttagtagagatggggtttcactatgttggccaggctggtcttgaactcctgacctcaggtgatccgcgcgagccaccgcgcccagcctgagcatgacctttgagcattatgtcagtgctgaaaaagtttcagattttgaagcctttcagatttcagttttttgtttgtttgtttttttgacagtgtcttggtccattggccaggctggagtgcagtggtacaatctcggctgagtgcaaccttcacctcccagtttcaagcgattctcctacctcagcctcctgagtagctgggagtacaggtgcccaccaccgtgctgggctagcttttgtatttttagtaaagacggggtttcaccacattggctaggcgggtcttgtactcctgatgtcaggtgatccacccgctttggcctcctaaagtgttgggattacaggcatgagccactgcacctgaccagatttcagatttttggattagggatgttcaacctgtattaggtaaatggattgtagtaatgacatggaagaagtcgtgaagttcatgagttaaagactgaagtttggtatgcatccattaatgttgtttctggtatggaaagagggattagaggccaggagagtagggaggaggctggggtaaggatccaggtgttagagggcagtgtcctggcctaggctcagatatatggggctgggggaaaaggatgggttggagaaatgatgtttacaggcagaaaggatgaggatttggtgcctgtcggtaattggaggaggccatcacaggtctaggggaagacactgaggtcagtttgggacacagtgagtatgaaagggctcagaggccatctaggggaggcatccaggatgctgctggtgcatggaggtcttgagttctggaaaaaagtgggactctatagacagatgaggacacgtgtcatctctagagacaggaactgaggtcatggaaagtaaaatggacagggagagagggcatggagggagaacaaagtggccctggactgagccctggtaattgatgtcagatttgaaggggttaacagtaagaggagcttgaagaggagctggtggagttttgagaaaaaccaggagagcatgatacggcagaagccaagagaggagcatttctccagggagggcatggttggggtgccagatgctgctgggatggtagggaatacagaatggccacagaattagcaacaggggtggccagtgatcttcgtgagcagtgtggactagaaacagagatgggagtcactgtcacagagatgtccaccaccgccaagggagaggacgagatggccttggggagttgtagaatgggaagagatgggccaggtgctgtggctcacacctgtaatcccagcattttcggaggcagaggcggatggatcacctgaggtcaagagttcgagaccagcctggccaacatggtgaagccacgtgtctactaaaaaaatacaaaaattagccaggtgtggtggcgcacacctgtaatctcagctactcaggaggctgaggcaagagaattgcttgaacccaggaggtggaggttgcagtgagccaagattctgccatggcactctagcctgggagacagagtgggactctgtctcaaaaaaaaaaaaaaaaagagagagaaagaaatgaggcccaaggaccaagcttcatcaagctattatagttaaagactcggtggaaagtgagcaagaggtctagtgcagggagaagcccgggtcaactcccagggttgcttgggtggctggggagatggcagtgctgtcgctgagataggatggtaaccagagaggccaggctagagtgaaagggatatatgcagagcaaagtgggctatgattggccaggccaatctgaggtcagatttagggtgaggaacttggtttttggatttttggggtagcagaattctggtgctacaaccctgcctgacccctgtaggtagacgaagagcggcggagtgcagcgggcagtgagaaagaagaagagcctgaggacgaagaggaggaggaagaggaggaggaatacgatgaggaagaggaggaagaagatgatgaccgaccccccaagaaaccccgccatggaggcttcattctggacgaggctggtatgtcatagtgcttggccagtgccgagcagaggctgagcttctacttttagttccatttctttttctttttttgaggcggagtctcgctctgtcgcccaggctggagtgcagtagcatgaacttggctcactgcaagttcatgccattctcctgcctcagcctcctgaatagctgggactacaggcgcccgccaccacgcccggctaattttttctattttttagtggagacggggtttcaccttgttagccagggtggtctcaatctcctgacctcgtgatctgcccgccttggcctcccaaaatgctgggattacaggcgtgaaggaccaaagttcttaacttttctcgtgctacggccccttctgtagtctggtgaaaccctgttcccttctcagaatcatcttctgaaatgcataaaacaaaatacataggattccaaagaggacaatttattgaagtacagttatcagaatatttaaaaagaacattttggtgcatatgtttctttgttaacatatttaggtaataagactttgtaggtagtctgagaatctaattttcaagtagcagtgagtgtaaatgctgccttgagatacctatagctgtaatgtgctgtgaaagagccagtgacacagctaacattgtgtggtttgttgccattgtatgtaattgatgtaaatgctaaatttcaattccaggttactgaaaataggagctgtagttttttcatcgaacacagaccaccccagatgaaaaatctctgttctacgtgttaaatccctgttagtcaaattgctaggtaaaggtggtgcattttgttgttgtcgttgtttttttttttttttttgagacggagtctcgctcaggctggagtgcagtggtgcgatggctcactgcaacctctccctcctgggttcaactgtttctcctgcctcagcctcctgagtagctgggactacgggcacgtgccaccatgcctggctaattttttatatttttagtagagacagggtttcactgtgttaggatggtctcgaactcctgaccttgtgatccgcccgccctggcctcccaaagtgctgagattacgggcgtgagccaccatgcctggccgcactttttttaaaaaaagattttttatatttacggccaaatatcagttcctaaaaagataagactagttcatacttccatgatgataatgaatgtgcatgttttcccttacctatgggaagaggggttacttagaacacatcctgcctctgttttcctgggactgttttacctgagaagaaaagtagtttattgtcaaagggacaggaggtgctctggatgttcttggagagcaagagaatggataccatgctgggtaaaagctgtgggttcccagggacacccatatgttggtggtggaagtgttggtgggcactgcctgtgtggaaggctgtgtggcagtgcctgttagcatttaacatgcaggaaccctttgaccaagcagttcctctttagaatttactttatggttaaacttgcatgagtgcatgaagacctgagaacaaagatgcttgttgtagtcctgttcgcagttgcaaaagtttggtgacctaaatgtttattgatgattagggcctggttaaacaaattatgggccatatagtatatgaggcatgtgctgctgtgggagagctctgagttagtagtagttttgagaaaaagaaaggtacagaacggtgtgttaaaaaaattacgtgggggctgggcgtggtggctcatgcttgtaatcccagcactttaggaggctgaggcgggtggatcatctgaggttaggagttcgagaccagcctggccaagatggcgaaaccctgtctctactaaaaatacaaaaattagctgggcgtggtggcgggcgcctgtaatcccagctacttgggaggctgaggcaggagaattgcttgaacccgggaggtggaggttgcagtgagccgagattgctgcactctagcttgggtgacagagcaagactcggtctaaacaaaaaaaattacatggggggaacatagtggtggcggggtggattacatgcatttcttttcttttcttctttttttttttttgagatggagtttcgctttttcacccaggctggggtgcagtggtgcaatctcagctcactgcaacctccaccttctggtttcaagtgcttctcctgcctcagcttcccgagtagctgggattacaggtgcctgccactacgcccagctaatttttgtatttttagtagagacagggtttcaccatgttggccaggctggtctcgaactcctgacctcatgatccacccaccttggcctcccaaagtactgggattacaggcgtgaaccactgcgccccgcctcttctttttttttttttttttttttttaagacggagtttctcttgcccaccctggagtgcagtggtgtgatctcggctcactgcaacctctgcctcccggattcaagggattctcctgtctcagcttcccgagtagctgggattataggcgtgtgccactaatttttgtgtttttagtagagacggggtttcaccatgttggccaggctggtctcgaactcctgacctcaggtggtccacccatctcggcctcccaaagtgcggggattataagcatgagccattgtgcccagaccttttttttttcttttttctttttttttttaaagacaggatctcactccgtttcctaggctggagttcagtggcatgatcatggctcactgcagcctctacctcccaggtccaagtgatcctctcacctcagcctcctgagtagctgggaccacaggtgtgcatcaccaggcctgactagactgtttttttttgttgttgttgttgttgttgttgtttttgagacggagtttccctctgttgcccaggctggagtgcagtggtgtgatcttggctcactgcaacctccacctcccgggttcaagcaattctctgcctcagcctcccgagtagctgggattacaggcgcccaccaccatacctgactaattttttgtatttttagtagagacgggggtttcaccatgttggccaggctgatcatgagctcctgtcctcatgatccacccgcctcggcctcccaaagtgctgggattacaggcatgagccaccgtgcccaaccctaactaattttttaagtttttggatttaggaggtctcactatgttgcccaggccggtttcaaactcctgggctcaagtgatcttcccacttcggcctcccaaagtgttgagattacaggtgtgagccaccacgtccagccttacatggatttcatatatgtacacagatatctctaggcaagaaactagtcacggagttgcctttgggagaggttactgagattctaggggttagaaatgtgagggagacttaattgatacttacatcctctatggacattggagtttttcattatgtgcatgtattacgtttttagtgtaatgtttgatacctgcaaagcagtacatccaacatggtaaagagattaagtacatggaccatggagccagactgcctctctcagatcccagctgagtctgtgggcaagttccttaatctctctgggtctcagagcctttgctgtaaaataggaacaacgatagtgcctccctcggggttgccaggaagatcagtgaggaacctgtgtcaggtactcagaacagggcagggtgtatagtatgctctcagcattagctgttataaatgtacaagaatcataaaaccaacagaccatgaaccatcttttaaaaaactatttattgatcattttctgatagttgggagggaacttttctttttgcttactttgatcttagttttttaaaagggatttgggagtggagtaaggagaggggatgacttttagagttagttggagctgtatgtccccctcgatcctgatgcgtgcaccagctctgtggcacggccccagacgagtgcctccctgttggagcctcagtgtcctgctctgtgcggtggggatttgtagtgcacatctcccagaggagatgcttcgtgtcctgggagctgttatgaggtcacctttgccacttaccacttggcctttccgttttagatgttgacgatgagtatgaggacgaggaccagtgggaggatggagcagaggacattctagagaaaggtgtgtgtgagccctgcctccacaagactactgggaagagggtggctgagagggtcttcagagcccattcccccgacccccgcatcccctgtacaccccaactcccaccgtcctcaccttgcttctttctgtccttcccagagagaccagctccctgctttttccttttaggcccatgagtggggggtggggccctggggtggggatgttgtggggagaggactctgggatcccagggcccagtgaatcccttctggggttgtagggtgggcgagctctgtcccaagataccccccacttcctgggccagtgcccccctttccccgttattttccgttctgtgcgcctcatacatttcggcttctccccaaccacctggtgcctggcctttacttttggttttcaacctttctgtgtccctcccttcccctcccccaacccattggttgattttgctgctataatttggctcatactttgtctgccctcgcccaccaccaccaccaccaccaccaccaccaccaccaccaccacctcctcttcctccaagtagaagagattgaaggtaagaatatgaaaagtgtgattccctgaccttcctcccatatcctgacatttcctccttcctgaggcacctgccctcaccggtagcctccccaccagccccggtctggccctgagggctctgacccatgtaggatccagagtcagggagttctggggccaggtataccccagttgttgacctgggaaagcacggatgtgtctgtctgggactgagcatttgtgggtggtagcgatgtgtggggtggggtgcagtccagggtgtgcctggactttgagatgggaacagctggaagccccccaacttgctgggccccatccccagtctttttgacaagaagcaggatgctgagtaggacagagtaggggatgaggggttgggatttcctctgtgagatgtcatcttcctgccccagggccaaaccctggccctcttagctgcacgctcctattttctccaggcccctgccctccacctgcccttgctcacgccctctgcccattatttttcagcctccaatatcgataatgttgtcctggatgaagatcgttctggggctcgccgcctgcaaaacctctggaggtgggcaaggaagggaaacgtggtgggattggctcctgtggggagatttgggagtaggtcagcccacctgctgtcctcaaccttcaattcgtgtttgcttccccactcgtgctccagggaccagcgagaagaagaactgggcgagtattacatgaagaaatacgccaagtcatctgtgggagagacgtaagggcatggtgggggcaggtgggggcagggagcaggtggtccctaagcgggaaggggcggggatctgacagagcttcaccccttcctgactgccctcctcccttcagggtgtatggaggatctgatgagctctcagacgacatcacccagcagcagctgctcccaggagtcaagtaagggggttgggatggtgggggccgtgctggggtgcgaatcttgtatggggtgatggtgcctagacaggtggctccctgaaataagtcagggcagagtcacacaggcagtgtggtggatggcaggggtagggagggcaaggtggcactttctctttcctcttgctcctgggtagaagcgtggggaagtcagtgagtgtgagggaacctggatgtgaaaccagaggaagggggtggccctgggggttcgtctgtttgttactgaagatccagcttcactgaaggccttccttttcctctgctgcttagggatcccaatctgtggactgtcaaatgtaaggtatgtgctctgatctcggggcttggaggaggtgggagaatgagggaggctgctttgtgggggagaagtgtctgtctgtcccgggtctccgtggcctgccagtcacttggtccttctgtctccatccctcactccacgttactgactggctatctcccacctccatcttcctggctgtccatccttctttctctctcctctcttggtcctactttatttttcttgctgctgtctccttccccctttcctgtgtcctttcctccatcctgtcatctctctcaaatctgcctctcatcttccagattggggaggaacgggccacggccatttccttgatgcgcaagttcattgcctaccagttcacagacacggtaagtcgggtagacaggcggcttggtggggagacatggcaacacccagagggaagaacattgtcaacttcaggggtaccaggtgcctctgttgtgagcagagctgcctgctgagtgagctgcttgagctggaataagaccactgcctagatggaagggctcttctcggcctagatggatatgttgtctttgttctctgcatttatggcagggtcttcccacccttgtagccctttggaagtcagccagctagcttcctgcaccttttcttcatgagagtgggtttgcctgttcaccagccctgttgggctggggtcacccacttcaccacatgccaggcagcaaatgctgcatccaaggcccaggtctttctttagactgacagagtttgagtcctgcccttgccacttcttagctgtgtgactctgatgcacctacttcccctctctgggccccttggttgcctctcagcatcattaggattaagtggcttttggctgggtgcagtggcattcacctgtaataccagcactctggaaggctgaggcaggcagatcacttgaggtcaggagtttgagaccagcctggccaacgtggtgaaaccccgtctctactaaaaatacaaaactcagctgggcgtggtggtgcacacctgtagtcccagctacttgggaagctgaggcagaatcacttgaacccaggaggcagaagttgcggtgagccgagatcgcatcactgcactccagtgtgacaaaaaaaaggattaggtggctttatgtccagctctcagctaggacttgttctgcagcttgcatttacttagcagagctgttgtcaaaggcttcattggcagtttgggaaccagggcaaacgctatgaagggtgctggctggtaactttctcagttaacatgatccctgctagggatcatgctttcacctgtccagccactgggtgtgacccagtgggaccaagtagacagttgtagggtttgcaaactatgcttttaaatgtgctcaaatgtcctcctcaaaggccggccatggtggctcatgcctgaatctccagcacttagggaggctgaggtgggtggatcacgaggttaggagttcgaaaccagccagtttgagaccagcctggccaacatggtgaaaccttgtccctaccaaaaatacaaaaatcagctgggcatggtggtgcttgactgtaatcccagctacttgggaggctgaggcaggagaatcacttgaatctaggaggcagaggttacagtgagccaagactgcgctattgcactccagcctgggcgacagagtgagactccgtctcggggtgggtagggggtggaatgtcttcctcattattatagtaataagtgtccctgcctgtcatgggtgagattgggatttgtggggtatgattccccaacagggaggttgaaaaggtaccttttggctaggtgtggtggctaatgtctgtaataccagtattttgggaggctgaggcaaaaggagttcgaggccagcctggacatcatagtgacatagtgacaactgatttctacaaagaaaataataataggccgggcgcggtggctcacgcctgtaatcccagcactttgggagactgaggcgtgtggatcacctgaggttaagagttcgagaccagcttcaccagcatggtgaaactccgtctctaccaaaaatacaaaagattagccaggggtggtggtgcatgtctataatcccagctacttgggaggctgagacaggagaattgcttgaacccaggagttggaggttgtagtgagccaagctcgtgccactgcactccagcctgggcaacagagcgagactgtctcaaaaaaaaaaaaaaaaaaataataataataataattaaaagaagtgtgctcaaatcctcctacatggtaccctggggtaaaattctagttacttcatttgagttatgtctctgattattatttttttttgagacggagtttcactcttgttgcccaggctggagtgcaatggtgtggtctcggctcactgcaacctctgcctcagcctcccgagtagctgggattataggcatccgccaccatgcccggctgatttttttgtatttttaatagagacggggtttcaccatgttggccagcctggtcttgaactcctggctcaagtgatccacccgccttggcctcccaaagtgctgggatggcagttctgagccactgtgcccagcctaaaatttaatttttttaaagtgtaaactgtggtggattttatatattgtagtgtattcataaccatcatcaccatctaattccaggacattttcattatcccaaaaataaaccgatacccattagtcatcactccccattcctccctcctcacagctcctggtaactatgaatctaccttctttctctgtggatttgactattggaactctgaatggttcatacaaagggaatcatacaatatgtcgcctttcgtgactgacttgcttcacttaatgttttcaagactcatccatattgtagcatatatcaagacttcatttttttgtttgtttttttgagatggagttttactcttcttgcccaggctagaatgtaatggtgcagtcttggcccactgcaaccactgcctcccaggctcaactgattctcctgtctcaatctcccaagtagctgggattacaggcacccgacaccacgcctggctaatttttgtgtttttagtagagatagggtttcagcatgttggccaggctggtctcgaactcctgacctcaggtgatcggcccacctcggcctcccaaagtgttgggattacaggcgtgagccactgtgcccagccttaattttcttttttttttttttttttgagacagagtctcgcaccgttgcccaggctggagtgcaatgatgcgatctcggctcaccgcaacctgcacctcccgggttcaagcgattctcctgcctcagcctcccaagtagctgggattacaggcacccaccaccatgcccagctaattttttttttttttttttttttggtatttttagtagagatggggtttcaccatgttggccaggctgaccttgaactcctgacctcagatgatccacccctcagcctcccaaagtgctgggattacaggcatgaacccactgcgcctggccaaccggccttaatttttgtatttttagtagaggcaaggtttcaccatgttggccaggctggtattgaactcccgacctcaagtgatcctcctgcctcggcctcccaaagtgctgggattacaggcatgagccaccgctcctggccttttttttcttttagttggtatttacagctatacatttacttctaagcatggcttttttcaaatctcataagttttggtatctaggagtgtgttgccatgtatttgtgaatttcctaagtatctttctgttggtttttaacttcattacatatggatggagaatatactttatatgattttagttcttttatgtttactgagacgtgttttatggcctaacctgtggtttattctggaaagtttaatatgcccttgagaagaaagtgcattctgctgttgttagatggagtgttcttttttcccatttccgcttaataagtggaaagtgaagacgaaatgttctgtctatagctggctattaggtttaggtggcttacagtgttgctcaagtgttctctttccttgttgatcttgggtctagctctatccatgattgaaagcagggtattgcagtcagtgattgttactgttgagttgtcagtttcttccttcattttcattagtttctgcttcatgtattttgaggctctgttagtttcatatacatttgtaattctatcttcctgatggattgacctttttattgttacaaaatgttttttgttgtctctggtagcaatttttgtcttaaagtatattttgtctgatgtaagcactcctttcttggttcttcttctagttgctttttttttttttttgagacggagttttgctcttattgcccagactggagtgcaatggtgcgatctcagcttaccgcaacctccacctcccgggttcaagcgactcttctgcctcagcctcccgtgtagctgggatgacaggcatgtgccaccacacccggctaatcttggatatttttagtagagacagggtttctccgtgttggtcaggctggtcttgaactcttgaccccaagtgatccacccgcctcggcctcccaaagtgctgggattacaagcatgagccaccgtgcccggctctagttgcttttttacacagaacatatgttggatagctttctatattagtacatacaggttaatctaatttttattttattttttatttttaagagacagggtttcactctgttgcccaggctggagtgcagtggtgcgatctcagctcactgcagcctcaacctcccgggctcaagcagtcctccctgctcagcctcctgagtagctgggactacaggcatgtgccatcacacccagctagtttttgtattctttaactgcaacattgtatttcatggtacattaagccataagttaactagttactgtttctggatatttttaaaatttttagtctggtttgtttgctgtgataaataattctgcagggaacacctttgtgtccatgtcattgtgccagtgtgtttctgtggaataaattcctagaagagggactgctgatgagtggcagtcatttctgttattagccgttgtgtctcactgtttcctccttccaccggctcaccctgcagcccctgcagatcaagtcagtagtggcaccagagcatgtgaagggctacatctacgtggaggcctacaagcagacccacgtgaagcaggccattgagggggtgggcaacctgcggcttggctactggaaccagcagatggtgcccatcaaggagatgacagacgtgctcaaagtggtgaaggaggtggccaacctgaaaccaaagtcctgggtccgcctcaagcggggcatctacaaggatgacattgctcaggtgcccggggcggggtggcatgggggtcagggtccctccattctgttctcccttcctttccttttgtccttcccaccctctttgtgctgcagagaatagaatcccactcagatgagttgaagcagagcctgggttttgtgagcacacaggaaacggttggctgtcttctgtgcacattcccaggcgtgttgagtaaaggtctgaaggatcggagggcgtgaggcatgtggagctcttggggaggagtgttgtaggcagcaggagtggcctgtgagataggatggcacagtcactggctacagcagggatggcgtgagatgagttagggagctcacgagggcctgcggcccattggagagctttggtgtttactggcgtaggatgggagggctgtaagggacacaggcagacttcaatgttaataagatttctctggtgactgtgttgagactagaccactggttctcaagccagggtgatgtttccccaggggacatttggtaacgtctggagacatttttggttatgtcagctggggagggggttgacgattatggcatctagcaggttaaagccagaaatgctagacacacacatcctccaatgcacaggatggctgcccacaacaaaaaattacctggcccaaaaagtcaatagtgccaaggctgagaaacccgggaatagcctggagggggccatgggcaagagcgtggagaccagggaggaggctgctgctgtagcacatcccacccagatggcagtgctggtgggataggaccaagaccctaatacacgttgagtgtctctaacctgaattcttgagaccacaggtgtttttcagatttcagattttttcagcttttggaatatttgcattatacttaccggttgagcatcccaaatctgaaaatccaagagtgagcatttccttcgagcatcatgttggtgctcacagggtttcctatttttgagcattttgggtttttggatttggaatgctgagactgcagtggaggaggggaagaggtcaggtattttgaaggcagagctgatggaatttgccaacgggtcgggtgtgggtgtaagagaaacaaaggagtcaagagtggctcccaggttgtgtgcctgagcagagggaagaatggagtgggaggcggcaggtttgggggaatcagcggtttggctgcggtcgtcctggatttgagggacctttagacatccaggtggagataccaagcaggcagtggctactcagtgccagagttgaggggacagacaagctagcgtgggacttttgggagtggtcagcagcctggtttcttccccaccatcctgcgtcccttctccttcctagcatctcctgacccttcttgtgtctggggtcagggaggagagtggggccctgctgaccttctgctcgccctgctcaggtggactacgtggagcccagccagaacaccatctccctgaagatgatcccacgcatcgactacgatcgcatcaaggcccgcatgagcttggtactcaggggaatctgtggcctgggggggagggagtgtgctcgatcccactggtggccaagccccctccctcacccttcccacccatgcccctttcctccatagaaagactggtttgccaaaaggaagaagtttaagcggcctccacagaggctgtttgatgctgagaagatcaggtgcgtgtccttggggactggctgggctgggtccccagggccggtgtgtagaatgtgccttttgcaggttcctccccaggggtggccccgccacaggtttagcctgtgaattggttagcttggcagtatagcctcaggcaagtcacttcacatccctgtgcctcagtttcttctgctataaagattgatgaggctgggcgcagcgggagggagcactttggaaggctaaggcaggaggcttgcttgaggcaaggagttcgagaccagcctgggcaacataatgagatcccatcttttaaaataataataataataaaaagaaaaaagttaaaaaaatatttaaaaagattgatgaggctgggcgtgatggctcacacctataatcccagcgctttgggaggccgaggcgggcggatcacttgaggtcaggagttcaagaccagcctggccaacatggtgaaaccttgtctctactaaaaatacaaaaattagccaagggttgtggtcagctcctgtaatccaagctacttgggaggctgaggcaggagaatcgcttaaacccacgaggcagaaattgcagtgagccgagatcgtgccactgcactccagcctgggtgacagagcgagactccgtctcaaaaaaaaagaaaacaacctctgcttcctcagattatagattatagtgagaattaaataaattagtatgcatatgtactcagaatgcccttggcacgtagtaagtgtgatccatggtgtgatatattgaaatgggattcatggactatgtcaggctttagaaagtctcctttcctgatctgcttatgcccacttgagatgggggggtatggagtgcctttccctcaggatgccccccagactccctagctgggtagagaattggagcagcccaggaatttcaacatcccagggccaactgggggctccggcagggagggcaggagaggaggacatggagaaacgagaggtgccagtgacactcttccctctggtcctgttctagaactaattgtgtgtgattcagccagtcaggttttccttcagataaaggaagagctgtggaatgcacctttgagtctgcacccaagggccttgctaatacttcacctgcctgagttcggacccatttataccactggtttcgactcacctgaacctctctttgcaaagaacaaaccctagtgctcccttaccccccagcaagccagctgaccaagtaccccagcatgcccagcagagcatgctggcccctctcccagattcaccatgggagaaggcgattgcatgagcgcaggaggaacttgacctgctcctccatgaaggaggctccttccccaccccggagactcggaacaggcactaagcggccgccactccacatttggggccgggagctgcaggcttgggagtcccacctgcctgcttttgaatcctgtcaagactgtggcttggcacccttgggcatgtgatgtgaccttcctgagcctgcattccctcacctggaaatgatgagcagttactgatgccacagatttggggaagagcctgtgaggtcatgagtgtgcaggccaggctgagcgctctgcgaatattcactggtatcattgtctgaaactgttattttgttcagctaatgtttactgcatactttctgtgtactgggcactattcttggtgaaatttagtgaatgttacatccctgaccttctggagctgacatgctagttagggggacaggtcaaacactagattgtcagatggtgatcggtgctcaaagataaatcagggaatgggtggaggagtgcagggaggtgggaggcgggcctttggggtttgtgagaagtcactgctgccaagagggtgtgtgctgggatgggatgggtcagtctgcctgtggtcctctccttctgttgccagctgagaagactgaggtacagcaagattttcttcttgactctcccttctaatcttctctcccccatcaaattccaggtccctggggggtgatgttgcctctgatggtgacttcctcatctttgaggggaaccgttacagccggaagggctttctgttcaagagcttcgccatgtctgctgtggtgagggtcccagaggggtgttggtaatgggggtggtgtgagtgttctcctgcaggtgatgccctgggctgtgggttatctggttctgtcccactcctcaagttaggagtgttccctaggagaattattcccctaggacccactcagcccactcagctgggctgttgcactgacctcggtccatttccttctcttcccctcaccgctgggggcttagatcacggagggtgtgaagccaacactctctgagctggaaaagtttgaggaccagccagagggcattgacctggaggtggtgactgagagcacaggtatttgatccccctctataacctgggccaaggagcaggggcggcccatggtggcaacccccgagtcagccctacgactgcccctgcagggaaggagcgggagcacaacttccaacctggggacaacgtggaggtctgtgagggtgagctcatcaacctgcagggcaagatcctcagcgtggatggcaacaagatcaccatcatgcccaagcatgaggacctcaaggtgggtgcccggtgttctcgggcaggggttggagtgttcaggcacatctgactgtatgtggctgtcgaggcggtggtgtgcctggtgacacctggtttccaggagggtaagttgaggcccttctagcattctcaggtgcctgagaggctctgtctgagtgcagctcagggtcggtgggcagcaggcctgcctggtggtgtctgtctctggagagtgacttggtctatcttttgtttctgaaaagcaagatatctgggtagtactgggttgagagtgtgattaaccaaggagtaatctgaggcttgactttgtttgcttagagcggggtgtgtgtttgtctgtgtctggtgtatgtctgaggggttgtgcaggcccagtgtgatgtgtggggtgaggctgtctccgggtggggctgaggagctgtccagtcgggggtcctgtgtctgaggggcaggctctctgtgtgggtataggtaggcatcgtgtgtcttgagggcgggctggggtaaaggttgtccaggttggtgtcctgtgtctggggtcagctgtttctggggcagtctgaggggtcgtccaggtggactaaggtagtctggggtgggtggtaagagcctgaagtggggtttttgagaacatgcgtagattctgaagacaggaggggcaggcaggttgtggtggtctcccttcacctgtttgttgtccccacacccaatcccccaggacatgttggagttcccagcccaggaacttagaaaatacttcaagatgggggaccacgtgaaggtgattgctggccgattcgagggcgacacaggcctcattgtgcgggtggaggagaatttcgttatcctgttctctgacctcaccatgcatgaggtaggtggatagaagggtcggggaagggtgcacgtgccaagaggagacccaggtaggcgagccacctggactgggcctcacccctttcaccatccctggcagctgaaggtgctcccccgggacctgcagctctgctcagagacagcatcaggtgtggatgttgggggccagcatgaatggggcgagctggtgcagctggatccccagactgtgggtgtcatcgtgcgactagaacgggagaccttccaggtgtgtgtgttgtgctctgtggcggggacttgcttttaggaggcttcctgtccctcaacccctcatcctgggaggtggcagagcccccagactgctctgggttgcagatctggctctgtcacttacatctgaatggctgatagtgggcacatggcaagtcattgatccctccccttgcctgttttcacaccctataaaatggaaacgagagcagcgtctactttgttcatagtgaatgattccctgaggttagatctgtaccctggtggctgttgctcgctcaaggatggagtgccacatgtgccctcctgcctttgctccttcctcatggatgtgggagtcatggagcacagtacttaggatcctggactccacatccacatcttggctttgttgctcctgtgctgtctgaccctgggctagtgactcaccctctctgagcctgagtttccctctgtaagatggaaatcatgacagaatccacctcagaggaagttttgaggcttcagtgaaatcttacggggcctgacacagaatgatggatgaacaatgttgctatcagccccttcttccatctctcaggtccctgttgcccaatcgggggtggagtctccttccaaagggtgttttagaatgactgggaacatttttggttgacccagtacctaaagggtggcactctgcctgcctgccccgcagccagggaattgagatgccttgtggagcttgggactgtctcccacaaggaaggattatcccactttagggaacccctgccccgtgtctccccttcccattctcacccccacagcctccctgctctccctctgtaggtgctgaacatgtacgggaaggtggtgactgtcagacatcaggctgtgacccggaagaaggacaaccgctttgctgtggccttggactcagagcagaacaacatccatgtgaaagacatcgttaaggtcattgatggcccccactcagtgagtacaagttcctgcttttgagctgcatctgaaagaatttggttggttgggggtgagggggacatggtcaagagagtgacccttctctccccggctagggccgagaaggggagattcgccatctcttccgaagcttcgccttcctacattgcaagaaactggtggagaacgggggcatgtttgtctgcaagacccgccacctggtgctggctgggggctcaaaggtgaggtgggcatggcaggaccctgtgcgttgggtacctggctcagctctccaagcctcctctggccccagaagtgataagattgggcttgtgagggattaggagagcagtgtcattgtcaggtccttggcaaagagtgagaaggtttatttgggattctgagctgttcaccaagttattttaagttatttattcatttcattttactgagcacctgttaggtgccagacactggagaaccagtggtgaacaagacaaaaatactctgctctcacagagctgatactctagaggtggacagacagataaacccatcgtacagcttgaggtgatagcaagcgctgtgaagaaaacagaatgggctcaggagacagggagtgaccagggctgctgttttagacagaggagggtaaaaaaggcctcagtgggaggcagtattggagcagagacctgaatgaagggatggagagtgagcattttgggggaacagcaagtgcaaaggccctgaggtggggcttgtaggaaagtgtgcaggaccagctgtcacagaggaattcaggcctggggtgtgggtggctgggtggtctcctcagggccctgcacgtgggatgatgagttcctgtggtttgtggttcccccatcccctgcctgccagttcactccttgcttctatcctagccccgtgatgtgaccaacttcaccgtgggtggctttgcgcctatgagtccccggatcagcagccccatgcaccccagtgctggaggtgagaggggttcagggtcaggggatgtggtgggtagaaggggctggaaggaacttggttgttcagcctacactcactgagtgcctgtgctgggctgggcactgctattaggggttcaccacccacaggagggtagacgccacagtgacagcccagaatggtcagggcttccataggaaagccatggggcaggggtgggcagaggaggctcttaacccaagtagggaggagtcaagcaagtgaaggggacgttctgatggtgcccttgctgtgggcacagccgtgggggaccagtgacattctccccaatccccaggtcagcgtggcggctttggtagcccaggtggcggcagtggtggcatgagcaggggccggggccggagggacaacgaactcatcggccagaccgtgcgcatctcccaggggccctacaaaggtgacctgcgaggcctgtggaggcctggggaggggcatggtgaaggagagcctgcccagcctgacctcctgtccccctgcaggctacatcggtgtggtgaaagatgccacagagtccacggcccgtgtggagctgcactccacctgccagaccatctctgtggaccgtcagcggctcaccacggtgtacgggcggggcctggggagggccagggtggggcttgctaggcagtgagaggggtctgctcaccccatttgttctctgcgtccccaggggctcacggcgcccgggcggcatgacctcgacctatgggaggacgcccatgtatggctcccagacgcccatgtatggctctggctcccgaacacccatgtacggctcacagacacccctccaggatggtgagtgcccgcaggggacagggaagaggggctagggggacctagagaagggacaggacagacacactcatttcccccattccaggtagccgcaccccacactacggctcacagacgcccctgcatgatggcagccgcactcctgcccagagtggggcctgggaccccaacaaccccaacacgccgtcacggtgagtccagggttccccaggttctggtgtgtgctggtgtgtgtgagggatgatgctgggtgtctggggcattggaggggtttgtggggcccacccagcattctctgctcctagcctcaggctggtccctttgaaggaggaggcatagcatggcggggcgggggcaaagcggcctcctctccatccccaacctcagtagtgattgtggttacccttgggcctggagaaagactgcctgggtggagtgaccttgggagggcaccctcatctctgtcaaccacagtgtcagctgtggaagggaaataacatcaggagtgcctctggatggggctcccgtgagaatgaaattgcttcagttgggggtctggtgtagggtgctgttctggaagcatccatcgcattatcaccacagtcgctgtcaacagacttttctcccaacagggctgaggaagaatatgagtatgctttcgatgatgagcccaccccgtccccgcaggcctatgggggaacccccaatccccaaacacctggctacccagacccctcgtccccacaggtcaacccacaatacaacccgcagacgccagggacgccggccatgtgagtccactggggcctgccctcgtctacccctgcccaaaccctcctactgccaccacctcttttcccctccctcctccaacaaatgcccccttctctcctgtctctgcaggtacaacacagaccagttctctccctatgctgccccctccccacaaggttcctaccagcccagccccagcccccagagctaccaccaggtggcgccaagcccagcaggctaccagaatacccactccccagccagctaccaccctacaccgtcgcccatggcctatcaggtaatggtctgcctgcctgccctgaagggtggtgggctagggtgactttgggcatatagggtcggccaggccagatgactattcccaatgacacttcctctttcccctgcaggctagccccagcccgagccccgttggctacagtcctatgacacctggagctccctcccctggtggctacaacccacacacgccaggctcaggcatcgagcagaactccagcgactgggtaaccactgacattcaggtgaaggtgcgggacacctacctggatacacaggtggtgggacagacaggtgtcatccgcagtgtcacggtacgtggggcccagggtggtgggtgagcaggcatcctctccttggtaccccctaaactggagacagacctgtccccagatggtgacagcccagagtgggcagagctgggattgaggaagcctagagggcaaggggagctatgtgaacccaaaggaggcatcttacctgatttagcggggaatcagggagggctgcctggggaaggagaaatctgagccaagacctgacaaatgaataggagtaagctaaggaaagtgactggggtgagtgagttccaaatggagggaactgcatgtgcagaggcctggaggtgaggggaacctgggcacattccaggagctgaagggtttgttgtggctggaacataaagagccaaagggggccaagcagtgcttcacacctgtaatcccagcactctgggaggccgaggtgggcagatcacctgaggtcaggagttcaagaccagcctggtcaacgtggtgaaaccctgtctctactaaaaatacaaaaaaaaaaaaaaaaaaaaaaaaagctgggcatagtggcgcatgcctgtaatcccagctacttgggaggctgaggcaggagaatcgcttgaacccaggaggtggaggttgtggtgagccgagatcgtgccactgcgccccagtctgggtgacagagcaagactcctcaaaaaaaaaaaaatggtgagtgatgaggccagagagttggctggggccctgtcatgcaccagcctggaggacctagactgtccagagggcgccggagagccatgaaggaatctaagcaggagaggggtgggagcagatctgtggtatggaattctccatcagtgatggattgggggtggggagactgggctgggaccccagggggaggttgggctgcactggggcagggctgtggggaagaggcaggaggcaggtgggagagaccctcacgggctgaatggccaggcctcagagctaggggcttgttggtgagggaggtgaccaagatgaggtccagagctctggtggggcctgcagaccatggggcggtccctgagaccaggtccaggaagaggagcaggtgtggggaagacgctgaggccagtttgggacatgaagagtcaagaagcagtctcctttttgcctgttagcttcattctgatgcttcccttgctgattgggtcaccctgtccaccctgacatgcaccacaggccccaggccttggaaccaggcccagccttggcctttcctgcccccatttcaccttgagttctcagaatgagccctgagcctgtgtcccctggagtatgggcctcagtcccatgttgggagcaggacaggctgaccaggctgtccccatcctccaggggggcatgtgctctgtgtacctgaaggacagtgagaaggttgtcagcatttccagtgagcacctggagcctatcacccccaccaagaacaacaaggtaagggcagggggcaaggagataagatggggccgttgggtgctgacatggaccctgaccatattccccccacccccaggtgaaagtgatcctgggcgaggatcgggaagccacgggcgtcctactgagcattgatggtgaggatggcattgtccgtatggaccttgatgagcagctcaagatcctcaacctccgcttcctggggaagctcctggaagcctgaagcaggcagggccggtggacttcgtcggatgaagagtgatcctccttccttccctggcccttggctgtgacacaagatcctcctgcagggctaggcggattgttctggatttccttttgtttttccttttagttttccatcttttccctccctggtgctcattggaatctgagtagagtctgggggagggtccccaccttcctgtacctcctccccacagcttgcttttgttgtaccgtctttcaataaaaagaagctgtttggtctaaaagtgcgtgtgtgtgtgtgtgtgtgtgtgtgtgtgtgtgtgtgtgtgtgtatgccgtgggaatgagggtgttgtttttaagtggggtcatttgcagaccccacttccttgctttgtggttggggcaaataactggaccctacctaaatctgttttcccatctagataatagtgatagtgcctgccccagagagctcttgaggggagtgtgtatgagaagacgtcggaaggagatgatcagagtagagcttgtcatgtgattgatgacattatatcttattcaggcatgaattatgctaagtgaaaatcacagtatcccccaggaaacctaaattcctcctgtggtgcaggatacagtgcttgatggtcctttttctttgttttctctttatttttatttttttgagatggagtcttgctttctcaccaggctggagtgcagtggcacgatcttggctcactgcaacctccgcctcccgggttcaagcgattctcctgcatcagcctccccagtagctgagattacaggcgtgcaccaccacacccagcgaatttttttgtattttagtagagacagggtttcaccatgttgaccaggatggtcttgatctcttgacctcgtgatccgcccaccttggcctcccaaagtgttgggattacaggcgtgagccaccgcacctggccttttttttttttttcctcccctgagacagagtctctctctgtcatctaggctgaagttcagaggtatgatctcggctcactgcaacctgtacctcctgggttcaagcaattctcctgtctcagcctcctgagtagctgggattacaggcgtgagccaccacgcctggctattattatttttttttttttgtacttttaggagagacgggtttcaccatgttggccgggctggtcttgaactcctgacctcgtgatccgcccgcctcggcctcccaaagtgctggtattacaggcgtgagtcactgcacctggccaatgatccttttttttttcttttctgtttgaggtggggtctccctctgttgcccgggctggagttcagtggtgcagtcattgctcactgcagcctcaacctcctgcgctcaagcgatcctcttgcctcagcctcctaagtagctgggactacaggcgtgtgccaccacgcctggataatttttttatttttaagtttttcatagagacgggtctcactatattgctcaggctggtctcgatctcctggcttcaagtgatccttctgcctcggcctcccaaagtgctgcaataacaggcgtgagccacagtgctcagcggtcctttttcttgaaccctgatagcagtgacaccaggattgctgtagttcatccaatgacttgggggcaggagtgagtgcaatcttagagactggggcttagtacccagaacctgtttcccttcctcgttagatattcctgtctttttacaaatgtaaatgtattataaaacatttcaggccgggcgcaatagctcatgcctgtaatcccagcactttgggaggccgaggggggcggatcatttgaagtctggagtttgagacgagcctgaccaatatggtgaaaccctgtctctactaaaaatacaaaaaaaattagctgggcatggtggcgggcgcctgtattcccagctacttgggaggctgaagcaggagaatcgcttgaacctgggaggtggaggttgccgtgagccgagattgcaccaactgcactccagccagggtgacagagcaaaactctgtctcaaaaaaccaaaaaaaaccaacaacaacaacaaaaaaaaacaccaaaaaacatttcagacgttcaagattatataccaagaacaccaatgtccccatcagccagctgaggaaacaggaaacaatatgtactagataggacccacttcagcagcaccctaaatccattcccccagaagtaaccaggagggccgagttccttgtgtctttccctttcttgaatttgtatttttactaccttggtatttggttttaaagtttacataaacaggatctgatttttcttccactcaatttaagggaggttcgtggtgtcttatctatagcctctaattcgtttctcactcaagccctgtacagccagatactgctgttctttggctgagcctcaggtaaaatggttggctctccagtcctttatagaaaatcatggcaggaaggaatgggagagaaaacagattctgcctcccagctccacgtgaggaagagttttattattaatttttattttattttttttgagacggagtctccctctgtcgcccaggctggagtgcagtggcacaatctaggctcactgcaacctctgcctcctgggttcaagcgattcttctgctcagcctccccagtaggtgggactacaggcgcgtgccatcatgcctggctaatttttttttttttttgttatttttagtagagacgtggtttccccatgttggccaggctggtctcaaaactcctgacctcaggtgatccgcctgcctcagcctcccaaagtgctgggattacaggcatgagccactgcgcccggcctattattattaattttaaaaatagagattgcagtcttgctatgttacccagtgtggtctcaaactcctggcctcaagcgatcctcctgcctcggcctcccgaagcactgggattataggtgtcagtcacagcgcctggccagaagagttttcgagggctggcttttcaggtcgttttctgggcctcaatgtctatttctgacaatgtggggaaaagaaagatcagattgttactgtgtctgtgtagaaagaagtagacataggagactccattttgttctgtactaagaaaaattcttctgccttgagatgctgttaatctataaccataccctgttatagatgacggggttctctataaccaaccccgtgctctctgaaacatgtgctgtgtcaactcagggttaaatggattaagggctgtgcaggacgtgctttgttaaacagatgcttgaaggcagcatgctccttaagagtcatcaccactccctaatctcaagtacccagtgacacaaacactgcggaagaccgcagggacctctgcctaggaaagccaggtattgtccaaggtttctccccatgtgatagtctgaaatatggcctcatgggaagggaaagatctgaccgtcccccagcccgacacccgtaaagggtctgtgctgaggaggattagtaaaacaggaaggaacgcctcttcgcagttgagacaagaggaaggcatctgtctcctgcccgtccctgggcaagtcttggtataaaacccgattgtatgttccatctactgagataggggaaaactgccttagggctggaggtggaacatgcgggcaacaatactgctctgtaaggcactgagatgtttatatgtatgcatatctaaagtacagcatttaattctttaccttgtctatgaaccgttgttcacgtgtttatctgctgaccctctctccactattatcctatgaccctgacgcatccccctctccaagaaacacccaagaatgatcagtaaatactaagggaactcagaggctggagggatcctccgtatgctgaacgctggtcccctgggccccctttatttctttctctatactttgtttctgtgtctttttctcttccaaagtctctcgttccacctaacgagaaacacccacaggtgtggaggggcaacccatcccttcagacaattgggaggtgagggccgattgccttacacggtgagacaagcggcctgactcgtgactatttttttggacaaatcaggcagccactgactcccttcattatggcctcagctttatctctgggcaataagtgtgatcccttccttcgctgcgtcctttgcaggggcggtggcgctctgcaaggcccaagggggcgtggtccagatgactttgaatcccagttgtcgcccccagggtcagccaggagactagtcagaagcaaacgcgcctgcggcaatccgcccgatgcctttggtctctctcgggcttccgtccacccgcccctcccccgcgtttccattggctgtagctccggcccggggcgggcgaagagggagcgagtgggcggggccgcgtggcgtcagcgcaagatggcggcctcggcagcggtgttctcgcgcttgcgaagcgggctccggctcggctcgcggggactgtgcacgaggttggcgacgccgccccgccgggccccagatcaggtgagcggaacgagggtggccctctgaatgtggggtcccttccctggagttacggacatatcgccgccccttgggggttccgggacgcctcacctcagggtgctgaatgaaacgccgcttgtgttttggggcccttcccaacctcctgggtggttgctcccctaggctggaggctgggaatccaggtgtgtccttagaccccacctcccacccacgtgggtgccggaggaggagggggttaccgttccccgtttcagtgaccactcaggtgatacttgagcaggaggggcctgggacgctggagtcccagtctggccgtgggagttattttctctgtggcgttggtggtggcgaggtagacgtttgggtttccaattcgacttgcctccatgttgacagagacccagccattctgacctccaagtctatcacttctgtgccttagttccccaagccccagacaagtgattgcccttccccgcctccgctcctatcccttaccctataactctgctacttttagccccaagcagccggacgtcgtaactcccggttctgtctgtaccccttcccccaccacttgtgccctccgttccctctcatcccagtgtttaggccctcccatcccttattctccgtgctttgcttttctgggctgcagaccctccagtcctgttgccttcaggatcctgtgcacctggcctgttagcttttaaaactcctggcatcctggtgcgggacagtctggttttgaccctctgagcagccccacatcctgactgctactccagggacacagatgtccagggctctgtgggtgtctgcctcttggctcctgaacttgattcttcttggactggagggtggggaccatcctgacctctcttctctcttggctgacctcccctttctcaaccgcaggccgcagagatcgggagccgcgggagcactaaggcgcaagggccacagcagcagccgggctcagagggtcccagctatgccaaaaaagttgcgctctggcttgctgggctgcttggagctggtgggactgtgagcgtcgtctatatctttggtgagggacatatccctgtcccccagttttgttccttggcctccctggtccactgtggaacctcccactcttgcccactaccagcttctctcgtcttcattccctggctccttcctcaatagggcagccaaataagacacctaccttgaaaaccagggaagtcttctttcttctcccttccactccttaaggttctagtctttctagttggttcctgtaccaggataaaggaaagaggggaagatggggaaggataggcctggatcagcttcctaaactttgtctttcctcagcagccaaaaatccagccttcccactagttactttaaatcccacagacccggccgggcacggtggctcacgcctgtaatcccagcactttgggaggccgaggcgggcggatcacgaggtcaggagacggagaccatcctggctaacacggtgaaaccccatctctactaaaaatacaaaaaaaaattagcccggtgtggtggcgggcgcctgtagtctcagctactcgggaggctgaggcaggagaatggcgtgaacccgggaggcggagcttgcagtgagccgagatcgtgccactgcactccagcctgggcaacagagcgagactctgtctcaaaaaaaaaaaaaaaaatcccacagacccaaaagacctagccccagccccatttctctcaaagacccaggaatcttggctcccagccccctcctggcttgactccaggaggctgtgcctctctctttcctcagatccaggagtccaggccccttatcccactcctccctcgggacccaggggactgggccctaattcctcatattcatcctggtctcccttgcaggaaacaacccggtggacgaaaatggtgccaaggtgagggggaaagagaccgaggccttgccaggagtcctagtctgtgggtgagaggggtcccctttggtctgttcaggcacattgctggtctggagtgagcctttctttcccagtgacctttgcctgttcctcttggggtcctggagattccttttctgtatgtgatggggttctgcctctgacatcctaaaccttccatttttctctctacctcccagattcctgatgagttcgacaatggtgagtaaacaagcacagattctggagtccctgaccctctcaactctgtcatttgtaaggatgtctctctccccatctggtgtctccggcccctcctccttccactggggaggtgggggagccagcagctggatggctttgtggggagggacattacaaagcccaagcccacttccctggcccctcagccccgagcagatggtcagagacagatgggggattggagccttgggtgggagggcttggggacacagggtggcctatctccagacacatgggttcctgtgccttagaccaagcatctgcggttcccaactccttccccatccccctcgagcccctaccccattaggctcattttcaaaactatgccgccttcctctctccccttctggttaaccagcttttggtggtgaagtagatgacaaattggatagtagagagtagctgtcaatcctgtcacacctggctcttcctaggagaaaaatgaaattggtgggtccagaaagccacctgtttatgctgggggatgtttgcaaacagtcatgttaatacattgattgtttcaaactgggcagttgtagaatcatgctggcttcaacaaatcagtatgctgatttaaattgggcaggtacatctgcagttttaaagtgtatatgtttactagcctaactggtttcaatattgtggtttatttttatttttatttttttttgagacatagtcttgctctgttgcctaggctggagtgcagtgatgcaattttggctcactgcaacctccacctcctgggttcaagcatttctcgtgcctcagcctcccgagtagctgggagtacaggcgcacaccaccacactcagctaatttttatagttttagtagagacagggtttcaccatgttggtcaggctggtctcgaactcctgacttcaggtggtcactcgcctcagcctcccaaagtgctgggattacaggcttgagccaccactcctggcccaatatattgtgttttttttaagaggcaggcccatgtattgcactaaaaatactgtattaaagtaggtagccttgtaagtttactgttttatactggattcattagccgggagtggtggcctgtgcctgtggtcccagctactcaggaggctgaggtgggaggatcacttgagcctggaagttacaggctgcagtgagctgtgatcccgccactgcactctagcctggatgacagagtgagtctccatctctaaaaaaaaataagttaaaatgagaaagtaaactggagtcaatatattcacttaaaccagggtttttcacccttggccctattgacgctttggaccagataattatagaggactgccctgtgcattgaaggatttttgcagcatcctgggcatctgcctactagatgccagtattgcgataaccggttatatctcccggcattgccagatttcccaggggtaggcagatagacaaaattgttcctagttctgaaccactgttttatggtatatggatgtgtttatatatttattgtggtttagattcagcacactggattaaagtgggcagatctggaagcctagtgattcaaagtgggcaaaatacagtggcataaattaggtgtggtggctcacgcctgtaatcccaacactttgggaggccaaggcgggaggatcacttgagcccaggagttcaagaccagcccggtcaacagagcaagaccctgtctctattaaaaaagtatgtataccctggtgtaatgtcagcagatttacatgtatgtgggttttgttttgttttttttttttctgagacggagtcttactctgttgccacgctggagtgcagtggtgcaatctcggctcgctgcaacctccacctcccgggttcaagtgattctcttgcctcagcctcccaggtagctgggactacaggcacatgccaccacgcccggctaatttttttttttttttactgttttagtagagacagagtttcaccatgttggccaggatggtcttgatctgacctcgtgatccgtctgcctcggcctcccaaagtgctgggattacaggcgtgagccaccgtgcccggccttgtatgtgggttttaagtgggccaatgtaataagcattctgtttcatacctggggtagtatgtggatataagtatcagcttaaaatagggcaagtaaataaatctgtgttcctatctggcggtatgtcattgccttctatctttggacctagaaatgagttggttcaaaccaggcagatatgcagacctgtttgtatctggtagataagaaacccctggtttgtctgggaggttgaacagcggcttattgtggaatctctttgtgcctggtgttctcctagatccaattctggtacagcagttgcgccggacatacaaatatttcaaagattatagacaggtgagcagaagccctgggctcagtccccatgtctccagccctggcctccttgtctgagcgcccccatcctgtccctctcccacagatgatcatcgagcccaccagcccttgccttctcccagaccctctgcaggaaccgtactaccagccaccctacacgctcgttttggagctcaccggcgtcctcttgcatcctgagtggtcggtgtgtcccgggaaacccagtgggttggggatagacctgggcagtggggttgtgatgaggtggactttcagccctggctgtgctatgtgatcttggggaggagatgtcacctgtcattgcctcgctttcttcagctgggagaaggcagtcatgctaacacccactctgtagggtagtgtaggtgtgcccaggcacgctataagtgccacaaaggagccagacccgcagtcacagcctatgaacttcttgacctccaagagccacagagacagagggagagaactctgttctgggaatcccccaggctggatctttgtcctcttggggactctgaggacctctgggtcttggtgtttcactgtcctcactgtcttcccagctggccactggctggaggtttaagaagcgcccaggcatcgagaccttgttccagcagcttgcccctttatatgaaattgtcatctttacgtcagagactggcatggtgaggctctggggcaggggagggaatattggtgtggtgggaggcgtagagatctggaggaccagggctcagcctgaccttttctcgctcccttcccacccccagactgcgtttccactcattgatagtgtggacccccatggcttcatctcctaccgcctattccgggacgccacaagatacatggatggacaccatgtaaaggtgccgtgggttcatgggtgggcctctgggatttggcggagttggcaccacctgagggaaggagggcccagctctgaccctagcctcacctggcttatggttctgcccagattcgattcctgctggcaggcacatgcctgcctctagccttggccagacatctgcacccttctttgttccctggaatctgggtgtgggagtggggggaaatggggtctctctaaagaagacagttgggggttagtggtaaggtcgtacgatttagaagctggttttatcttgctgtgtctgtaacttagtgtttctgggaaggtttgcttatagttgtacatatgagactggttggggtttgtttgacccgggctctgttactgtggccagtgctgtattcaggagtccggatctgcgaatgggcctctgtgggtctggctccaagtgtctgtgtgtctgttggtttctgtctgtgtcgtgtcggggtgggggttctgtgttgctcttggaaattccaaaatacgtgggctgtgatcgagggtcttgaagggtctgtgtctgggtgcctgtctgtgtggttccctgggtgtggctgcagatctgtctgcacctgtttacttgagtgagaggttcttaaacctgcaacataccacagtcacctgggcaggggttaaacacgagagtggccacctccctctccagggaacttcctaatcacctctctgtgtgctaggccctgggtctagaagtctatgtgattagctccccaatatcctgggggttgttttgttttttgtttctgagacagggttttgctctgtcacccaggctggagtgcagtggtgtgatgaacatggctcactgcagtctcaaccttctgggctcaagcgatcttcccacctcagcctcctgagtagctgggcctataggcacacaccaccatgcctggctaatttttatttttatttttatttatttattttttttgtgagacggagtctcgctctgttgcctaggctggagtgcagtggcgcgatcttggttcactgcaacctccccctcccaggttcaagcgattctctttcctcagcctcccgagtagctgggactacaagcacacaccaccacacccagctaattttttgtatttttagtagagacagagtttcgccatgttgcccaggctggttttgaactcctgagctcaggcaatctgcccaccttggcctcccaaaattctgggagtacggtcgtgagccaccgcacccggccattttttgtatttagtagatacggggtttcaccattttagccaggctggtcttgaactcctgacctcaggtgatccgcccgcctcggcctcccaaagtgctgggattacaggcgtgagccaccatgcctggccctctgtgggggtcgatgccatcatccaaagccggtctttgagaggccctgccattgtgatcccagtatgtgtgatgctgtgtatgtatgtatgttttgtgtgttttgggtcttcttgatggggggagagttgggcacagatgttgacctgatctgtcactcacttccaggatatttcatgtctgaatcgggacccagctcgagtagtagttgtggactgcaagaaggaagccttccgcctgcagccctataacggcgttgccctgcggccctgggacggcaactctgatgaccgggtcttgttggatctgtctgccttcctcaagagtaaggctgacccctgatcccttggcctctgaccccagagcccctgactctgaagaggaaggataaatgcatgattcatggctgggcgactgaggtgcaagaggtgcctgagcaccttggagtctttaggagcttcttaggatgttcatggaatgtttgggggatacttggggatgttcaggggagccctttcagagcgttcagaagcattccaggtagcactgactgcccccgtgccccagtgcgggacgttcccctcatgggccctgcctccctctggcctttagaagcctggctgaccaccccctgttgtgcccacagccattgcactgaatggtgtggaggacgtgcgaaccgtgctggagcactatgccctggaggatgacccgctggcggctttcaaacagcggcaaagccggctagagcaggttggtgctcagatgcccagagtggaggatcggctctgaggctcctgaaggaggagcctggggcagtccatctccacactcttggtttggctgtgtgaccctgagcagatacctcctctctgcctcagtctctgtaaccagggggatataacacagcctgtcctgtagggctgccagaatgaggggatgcattgattctgcagcctgctctgagaacaggaaacaggagaggatttgagattaggctgggagaggggttgcccttgatggtcttgagtaggtctgggggcaccttgtggaggtggattgtgggttttagatcaggcctggaaagaggctccctgggcacgtggcccaaggctgtggggagagatgtgatagtcttggtgggaccctggtaatttggaagtgggactgagagtatggattgcgtctgggtaagattcccaggggtctaggctgaggttcaccagattctaggttaggttcctagagttgggagcccctgagtgcccagagaagtccctagagatttgggcctggggaccccccagggaaccccccacccctgcatccagagaggggtcatggggctcagagggcccaggggcaggatgatgcagtctggtgaggagggccatggggtttggacctgggatctcaccagcattcaccttggggtaacagggtctgcgataggatctcaggctcaggggaggggtccctgggatctggggaaggagattatgacagtctggggcctgagaacctactgcagttcaggcctgaatacctcgagtgcctagtattggagtctgtcgtcccccaaacattgaagcctaggctcctgcggctcagagctggctcttcctagtgtctggggtggggggactggggtctagggtcccttgtgtctgggctgggggccccagggtttggggaaaggggtctggacttggcagaagtcagaaggaaaggtggtccctgggctgaggcctggggacctgggcatctgggaggaggctctgtccaccttgcgctgaccctctcctccaactgtccccctaccccaggaggagcagcagcgcctggccgagctctccaagtccaacaagcagaacctcttccttggctccctcaccagccgcttgtggcctcgctccaaacagccctgaactctgggcctcctcaaactcagtgcctgggtccagggccccagtgcttccagaccaagacttgggccaccacttgtccaataaagtacatcccagacgccacacctgctgtgtcccgagagtctccagatgggggcatcagggtgaggtccgggactcttgggtcatcgtcccacagtggctgatcggctgccaagcacagtgggggtgctttgttggatcagagcagatttttcaccctggtctcggaatctaaaaaccctcgctgtgtcttcctgtgtgttgcgtgatctgtgaaaaatacatctccctctgaccacagactcctcatctgtggagaagggaagagaggatggcacttggctttaaagacaggtagctgccaggctactgtggagagaatgtgttatgggcctagtgggcctctggtggaccagagattacccctctcaacaggccagctgctggttggctccagccagtgtggccctggggtaaagggggcctggagttgcttgacacgccagttgttcaaaagaagcaagaacttgggaatattttttttttttttttgagacagggtctcactgttgcccaggctggagtgcattgatgtgatcttagcttacaacagccttgacctcccggctcaagtgatctccaagtgaccctcctgcctcagcctcctgagtaccctcctggggactacaggtgcgtgctaccatacccagctaatttaaacaaattttttttttgtagagatggggtcttggtgcccaagctggtctcaaactcctagtcttaagcaatcttcctgctttggcctcccaaagcgctaggattccaggtgtgagctactgtgcccagctaaaatagggatttttatattaaatctccctattttaaaatgttggctcctagcggggcgcagtggctcacgcctgtaatcccagcactttgggaggctgaggtgggtggatcacctgaggtcaggagttcaagaccagcctcaacatggagaaaccccatctctactaaaaatacaaaattagctgggcgtggtggagcatgcctgtgatcccagctactcaggaggctgaggcaggagaattgcttgaacctgggaggcggaggttgtggtgagccgagatcgcaccattgcactccagcctgggcaacagcagcgaaactccatctcaaaaaataaaataaaataaaaataaaatgttggcttctaactaaaacaggcagatatgtagcagtgttctccactggaactttctgtgatgtttggttcatgttctaggtctgtactgtccagtacagtagccagtggccacataaacctttgttttttttttttgagacggagtttcgctcttattgcccaggctggagtgcaatggcacgacgtcggctcaccacatcctccgcctcccgggttcaagcaatgctcccgcctcaacctcccaagtagctgagattacaggcgcacaccaccacgcccggctaatttttgtatttttttagtagagacagggtttcaccatgttggttaggctggtctcgaactcctgacctcgtgatccgcccgcctcggcctcccaaagtgctgggattgcaggcatgagccaccatgcctggccccacataaagtttctgagcacttgaaatgtggctagtgtgactgagaaactgaatttttaattttgtttgagactgggcacagtggctcacgcctgtaatcctgacactttgggaggccgaagcaggaggattgcttgaatccaggagtacgagaccaccctgggcaacatggtgaaatcctgcctctaaaaaaaaaacaaagtaacgagcccagcgaggttatgcatacctgtagtcccagctacgtgagaggctgaggtgggaggaatcccttgagccaaggaggtcgtgcgtggctgtgatgatctgtgatcgtgccgctaaattctagcctgggcaacagagcgagaccctgtctcaaaaaaaaaaaaaaaaaaaaaaaaaccttaagatttttttttggagtcagggtctcgctgtgtcgcccaggctggagcacagtggtgtaactatagctcactgcagtgttgaacttctgggctcaaacaatcttcctgccttggcctccccaaatgctgagattataggagtgagccactctgcccaactacttttaattaaatagccacatgtgtctcctgtattgacagtaccactgtgtattaagagtatgagtcccagattgtgtaagttcaaatccaagctctaccacttctcggctggcttgtgatcctgtgcaagttactttacctctcagtgcctcggtttctacatttataaaataataactgggcaggcacagtggctcatggctgtcatcccaacacttcaggaggccgaggtgggaggatcgcctgaggccaggagttggagagcagcctgggcaacatgggaagagcctgtctcttgcgggggggggagaagaaagttcttgtctcaggctagctttggggaccaaatgaagcactcccatgtaggcactcaaatggaactatgtaaaccttaggcaaggcacctctgcctcagtttcctcatctctaaaatggggtgatggtagtatgttagcagagtggttgtgaggagtgaacgggacagtccgtatgtgggttatatgtatatattcccaggtgcttgctgttaccaggccatatgggttattcacagattgaaatatcttagctgggcacggtggctcacccctataatcccagcactttgggagaccgaggcgggtggatcacctgaggtcaggagttcgagaccagcctggccaacatggtgaaaccctgtctctactaaaaaaatacaaataaattagctgggcatggtggtgggtgcctgtaatcccagctacttgggaggctgaggcaggagaatcgattaaacccaggaggcagaggttgcagtgagctgagatcacaccattgcactccagcctgggcgacagagtaaggctctgtctccaaaaaaaaaaaaaaaaaaaaacaaaaaaaaaaccagtttgactttatctccctcgccctgcctccatccccacattgccccccactatcccagtctctcctactccagccttcatctagtgctaactgattaaatattctaagatgaccttctctggtgtgtgtgatgataattaaaaggcattcagaactgtgtggaccagactgaacctctgcactctagatttttttttttttgaagcctctacaaaggataattaaaatttacaccatgactctttgtcctggggtgcactgtctgtaagccggtggagttatttcccaaaatccttggtccttcccagcttgaggaagtctgcaggactgagggaggggacctgtgcttttttttttgtttttttgagatggagtctctgttgcccaggctggagtgcagtggggcgatctcggctcactgcaccctgcacctcctgggttcaagtgattctcctgcctcaggctcccaagtagctgggattacaggcgtgtgccactgtcaggcctctgagcccaagccaagccatcgcatcccctgtgccttgcacatatacacccagatggcctgaagtaactgaagaatcacaaaagaagtgaaaaggccctgccccgccttaactgatgacattccaccattgtgatttgttcctgccccaccttaactgagtgattaaccctgcaaatttccttctcctggctcagaagcacccccactgagcaccttgcgaccccccactcctgcccgccctttgactgtaattttccattaccttcccaaatactataaaacagccccacccctatctcccttcgctgactcttttcggactcagcccacctgcacccaggtgaaataaacagctttattgctcacacaaagcctgtttggtggtctcttcacacggacgcgcatgaaagccaccacactcagttaatttttgtatttttagtagagacagtttcaccatgttggccaggctggtctcgaactcctgacctgaggcgatctgcccgcctcagacttccaaagtatggggattacaggtgtgagccactgtgcccggcctaatttttgtatttttagtagagatggggtttcaccccgttggtcaggctggtcttgaacttctgacctcatgatccacctgcctcggcctcccaaagtgctgggattacaggcgtgagccaccgcgcctggctttttgttttgttttgagacagtgtctcactcttgctcacactggagtgcagtggcgctgtcaccactcactgcagcctcgacctcctgggccctcgtgatcctcccacctcagcctcccaagtaactgagactacaggcacatgccaacatgccaagctaattttttgcattttttttttttaagagagatgaggtttcaggccgggcacggtggctcacagctgtcatcccagcactttgggaggccaaggtgggcgaatcacgaggccaggagttcaagaccagcctggccaacttggtgaaaccccgcctctactaaaaataccaaagagtggctgggcgtagtggtgggcgcctgtaatcccagtcactcggaggctgaggcaggagaatcgcttgaacccaggaggcggaggttgcagtgagccgagatcgcaacactgcactccagcccaggtgacagagtgagactctgtctcaaaaaaaccaaaaaaccaaagctctgctgtcatgagctgatgttcagtgttctcatggaggagacaaacaatgatcagataacttcctagggtaataaatgcataaagaaaaagtatagcaaggagcagcagtgatctggggactcagaggactggtttagacctgatgggatggtcgggaggcctcttgggaaggcgcatctgagcagagatgggatgaagtgaggagggaagccctgggatagctgagtgtgcctgaggcacactcagggcctcatgcttaccgcaaggcctccgcaattgctgttcgctctgccagaagtgtttttccctagagactacacaacttactcctttaggcctttgcttaaatgtgaccttagcatggcctattttttttttttttttttgagacagtcttgctctgttgtccaggctggagtacagtggtgtgatcttggcttactgcaacctccacctccaagattcaagcgattctcctgcctcagcctccccagtagctgggactacaggcgcccaccactatgcccggctaagttttgtatttttagtagagatggggtttcatcatgttggccaggctggtctcgaactcctgacctcaagtgatctgcccgcctcagcctcccaaagtactgggattacaggtgtgagccactgtgcctggccagcatggccttctatggtgactacagtcaacatataaagaaaagttgtgaatagccagaaagatgctcagaaatcccttaaagtacacgacacgacacacgcacacacaccacaagaaaatccacaagaaatgccatcgtgcctgccacaaaccttcacaaaggctggcaatttttataatctttaaaattttagagccaggctcagtggctcacgcctgtaattccagcactttaggaggctgagacaggagcatcactcgaggccaggagttcaagaccagcctaggtaacatagtgagactctatctctaggaaaaaaaaaaaaacaaacaggccaggcgtggtggtgggcgcccataatcctagctaaatgggaggctgaggcaggagaatcgcttgaacccgggaggcggagattgcagtgagccgagattgagccactgcactgcagcctgggtgacagagcgagactccgtctcaaaaaaacaaaacaaaacaaaaacaaaaaaaccccaaacaaaacaaaacaaaacaaaaacaaacattctgagatatctcagacctggaatctgttccccccaatgatcatccagggcaggaatttgcttccttccatagctggttgcccaaattctgttaaaatatattctgtgatgggaagcctattccctcacctaacccagtattagacctaatttgcctccaggtgactttggtttacaaggtctggctttactccttggggccacataacttgtctgacctcggggggatgtggaaggagggtctcaaatgtcagccttagaagcttacatatttagaaggcactggggagctacagaaaagtctaatgcaagtgaaggaaatggtctgatttgtgcttagataaaccccacagggccaggcatggaggctcatgcctgtaatctcagcactttggaaggccgaggtgggaggatcgcttttgcccaggagttcagcctgggcaacatagggagaccccatctctaccaaaaataataaattagccaggtgtggtggctcatgcttgtaatcctagctacttgggaggctgaggtgggaggatcatttaagcccgggaagtcgaggctgcagtaagctaggataatgccactgcaccgcagcctgggcaacagagaccccatctcaaaaaaataaagacctcataggccagaatggtcaaggctgagggaggcacagacagaggggtcgggcagaataaaagaatcatagggggatgtgggagctcagaggaggtgcttgatgcttctggggagtgttaggtagtgctgcctggaggaggtgaagtctgaatggtgaaaaaggaattaaagaagggagtggagccgggcacgttgggtcacgcctgtaatcccagcactttgggaggccgaggtgggcggatcacgaggtcaggagttgaagaccagcctggccaagatggtgaaaccctgtctctactaaaaatacaaaaattagcgaggcatggtggtgcgcacctgtaatcccagctactcgggaggctgaggcaggagaatcgcttgaaactggaaggcggaggttgcagtgagtggagatggagccgctgcactccagcttgggcaaagaataaaactccatctcaaacaataataataaattaaaaaaaaataagggagtggaaaagacaaatacagggaaaaggagcctgggatgttctgcccaatctgacccatggcgctgccttgctcaaacgccactgttgtcagaattaagagaagaatctttaggctgtttttttctcctcctcctcctccttttctttttttttgtagaaaagtgtgtcttgctgtgttgcccaggctggtctcaaattcctggcctcaagcagtcccctgcctcagcctcggaaagtactgggattataggcgtgagccgctgtgcccagcctggtcttctttcattcattaaaaaattaactgcgcagggattagtggctcatgcttgtaatcccagcaatttgggaagccgaggtgggtggaccacttgaaggtcaggagttcgagaccagcctggccaacatggtgaaaccccgtctctactaaaaatataaaaaattagccgagtgtgttggtgggtgcctgtaatcccagctactctggaggctgaggcagcagaatcgcttgaacccgggaggtggaggttgcagtgagccaagatcgcaccactgcactccagcctgggcaacaagagcaaaacttcttcttctgaaaaaaacaacaacagcaacaacaaaaaacagagcgcctactgtatgcctggctctgctgggctaggcttcgttggttactatatcttacttctctggaaaaagacatataaattgaacctgtattttcccctataattattagcctctaagcactaaagttttttactttgggggggaaaaaaaagaagttaccccagctcaagggttttgccccatgcctggcagggagcaattatgaccagaggggctgggacatctgctcctaattggcttttcctgctgaggtcctggaatactaaagggtttctgaagggcccgggatgtccccccccccagttcttctggggtgggggagcgggtccctgtatgtgaagacggaatttcctgcccatttgctcctcacaccttccggaggccaaacgggcagcccagctgcggcccgaagggggaggggctcggccgcccggcagatggcggcatttacatacagctgggagccccctcttgaggccgagctcctcgccctggcgtctggtgcgtccgcgatgcggggtttgggagggtggctttgtcttgcggagggggaacacacacacgcctgcacacaggggtccacaaagagccctggatcttcatcgtatccacacacagctacacccgtggatctcccaaacccagtctcattcacacaaaccagcgcacacaggggtctacaaagaactccggatcttcatcgtattcacacgcggctgcatccgtggacctctcaaacccagtctcattcacacacaggcgccctcagccattcaccaccttgcacagcctctaccacacccgcacagagcacaaagtcacaggtttatacgcctatacaggatctcccataaacacacacgcacagagaagcagccacacagccacacaatctcaaagcgtcacacaatcacgaagtcgtgtacacttctagtgtcccactcgggtgtgcgtgcagaatcagaattgtttacaacctcataaatgtgtcaatcacacacaactccaggcgtatgctgagccgcacagtcccacgtggactcacaatgacaaagtcatgtgcaccctccggtagctctggttcataccacacacacaaaatcttaaaatcatgtacaacctcacacacaggcttagccccctaaccccaccccaccctagccacacaaaaagtcgcgggatcacccacgcatgacctcgctcgtgcccacgaccacagacggaatctcgctgttgctcctgcacgctccccctcccctgtgaccgccccccccgccccgcccttggtcccttggggccgggtagctgcctgaaggggcggggccattctctcagatataaggcttggaagccagcagctgcgactcccgagacccccccaccagaaggccatggtctccccacggatgtccgggctcctctcccagactgtgatcctagcgctcattttcctcccccaggtcagagccaggtgggaggtggcgtggaaagggatgaatgcggaggggaggggtgagtgcgacctgaaggtcctggggaaggagcgtggggcggacgggaagcctgggtcctcccggccgcctcaccctgcgcccgtctccgtcccagacacggcccgctggcgtcttcgagctgcagatccactctttcgggccgggtccaggccctggggccccgcggtccccctgcagcgcccggctcccctgccgcctcttcttcagagtctgcctgaagcctgggctctcagaggaggccgccgagtccccgtgcgccctgggcgcggcgctgagtgcgcgcggaccggtctacaccgagcagcccggagcgcccgcgcctgatctcccactgcccgacggcctcttgcaggtgcccttccgggacgcctggcctgtaagtgctgcccccgggggactcccggtgctggaggcctaaccctgccagcgaaacctccacctcctctcccctccagcttccaagaccctaatcctgcctcccagggggtggacgaaattcccagaccagtaactctaccgtctggaaccccacattcacagacctctaaactctacacactggggattctaaatgttctgattccccaaccctggatgctgggaccccaaattcccagaatttcaaacccaagctctgaaatcctaaactcaaggaaccctacctctgctccttggggatccctaaaaactgtggtcctcatctttatccccaaacctctcacaccttgtcttggggaccactaatatcttctctctctttttttttttttttctgtcctcagttctttcagttgggtcctgtattaattactctttcacctccaaaatcctgtctcccacccccacaacccaaaggcacaaagatgaacagacctgtattgcaatgcttgacccttgtccttttggacaagtgactgcctggtttccagcctcagtttcctaagcttaaaaatgggatcatcctggtacctcacaagggtcccttttgagcgattcaaccacatctcttgaataaagtgcttaccacgtagtaagtgctcaataaagcaagccacgtccagtcgctcacactgtaattccagcactttgggaggtctaggcaggaggatctcctgagcccggcagtttgagaccagtctcagtaacatagtgagacctcgtttctaaaaaaaaaaaaaaaacatagcagggcatggtgacatgcgcgtgtagtcccagctactggggaggctgaggtgggaggattgcttgagcctcggaggttgttgcagtgagccaagattgcgccagtgcactccagcctggttgacaaagtgagattctccccccccccccaaaaaaaagccacagatgtcattccctccctgggctggtctggtccctctgggaattgtcccttgcttgctcagtccccagcaatggccatcaccctccattcctgaactctggccttcattgagtacttaccctaaccactgtctttcatctttcatctcccccttccttcacccaaccagggcaccttctctttcatcatcgaaacctggagagaggagttaggagaccagattggaggtgagtgtcttcagtcttgggactggtggggagctggggcccacgtgagacacggggttggtggtgttatctataggtcttatgatgtcatcacagctcctgggatgtggtgctgagtgttgacagctccagggctcttggcatctcaggcacagaaatgtccctggtactggatgtagcagtggttctggtaccagacgaagtaggggaagctctcttactatcaaggctccagagcagagtgtagcatttcacagccctaccttatcatctgatgttgagagctcagggtgcgatatgaattacttctggttcttttatgtgaagttttttttttttctttccaagacagagtcttgctctgtcgtccaggctggagtgcaatggcatgatctcagctcactgcaacctctgccttctgggttcaagcaattcttctgcctcagcctcccaagtagctgggattacaggcacccaccaccacacctggctacttttttttgtatttttagtagagacaggatttcaccatgttgtccaggctggtcttgaactcctgacctcgtgattcacccaccttggcctcccagagtgttgagattacaggcatgagccaccacgctcggcccctatgtgaagctctgtcaccttgtccatgtggacatcccagggagccccgtgggatgttggagcttcaccaaggcgaatattgagcagaggttcctgggagggatacagggcattcctatcctcaacttgggagactctgttgctatgtaaggcccacagcgggggttttgtcaccattttttttcttgtttttattttttatggacatgggatcttgctatgttgcccaggctggtctcaaactcctaggctcaagcaatccacaggctttggcttcccaaaacgttgggattataggagtgagccacttcttcaccgttctgatgtagaaagctgtgtcacaatcttggggggtgacacctttgccttcaagaaagtgtcactctcccagtatcccaaggtctcaggtaatgtggtaacttatggtctagtaactggggtctctgtgactattttgatataggaagatccagaggcacaatttaggggtgttatgacctcacttcagacatgttattgttctttggccatatggaggtaccaaatgtcacagggtgttagaggtctcatcattacttcaatttacaaagatctgggtcaaggcccggcgcggtggctcacgcctgtaatcccagcactttgggaggccgaggcgggcggatcaggaggtcaggagattgagaccatcctggctaacatggtgaaaccctgtctctactaaaaatacaaaaaaaattagccgggcgtggtggcaggcgcctgtagtcccagctactcgggaggctgaggcaggagaatggcgtgaacccgggaggcggagctggcagtgagccgagatcacaccactacgctccagcctgggcgacagagtgagactccgtcgcaaaaaacaaacaaaaaaaaaacaaatatctgggtcaaaatacaggagtattacggtttctatgagataactgtttattttttatttttatttttttgagagggagtcttgctctgtcacccaggctggagtgcgatggccgatctcggctcactgcaacctccacttctgggtgcaagtgattctcctgcctcagcctcccgagtagatgggattacaggtgcgtgccaccacgcctggctaatttttttaaagaattttttatttttagtagagacggtttcaccatgttgatcaggctggtcttgacctcaggtggtccacccgtctcggcctcccaaagtgctgggatttcaggcttgagccaccatgcttggctgagagaaatgttacctagagtactagaaaggaccacgacattgcaggtcccagggtgcattggggagttcgcagccttgctaaagtagagggtgactgccattctactcgcgaggtccaaggaccccagggctccatgagggtgttttggcctcgctgggaggggcggggagaatgcggccggggcgctccgtatgcatccatgttcggccgggcccaccccagcacccctcctttgcctgtcctcgcagggcccgcctggagcctgctggcgcgcgtggctggcaggcggcgcttggcagccggaggcccgtgggcccgggacattcagcgcgcaggcgcctgggagctgcgcttctcgtaccgcgcgcgctgcgagccgcctgccgtcgggaccgcgtgcacgcgcctctgccgtccgcgcagcgccccctcgcggtgcggtccgggactgcgcccctgcgcaccgctcgaggacgaatgtgaggcgccgcgtgagtcctgcgttcgaccccaccccgtcccagccggggaccccggcccctcctgagcgtcactcgcggcccccagtcccctctcacaacccactcaccctcttcagggtactctagagtcccccaccatgtaccccaggcacccctcttcagggagctggggaacgcgctgactgctgcggatgtatcccaaaccccgcccaccatccagctgccaccttcggagaaactgaggaccctggacctctctccagccctgccttgctactcgagcccccttccctctcccagccctcttgttgccccaaatcggaagcccacgtccattttctatgctggcaccctccagttccttccctaacccacattcacaccctgtcctgatgctaggactccaaagctcttctaattctgcggccctcccgactcccactcggaagctttggaatctcctcccagtccactctggccaaggggccctccatcctccctccctagggttgcaggccagaacccatggcttcttaaagcttggaattcttcagacttctccccaaatttcagagccccaccaaggcccctaggactcccaggctaatccagatcttctcagagccaccctaattcaatacactcccatcttccctgaaaggccaggggtccccccaccaatcccaaatcccctcactgtctcctatcctcacgatctcacctgggtgcccctgtcccatcctctttccaagagcacagactccagcccgatggcctgggttcacatcatcactcctccacttcctaggtgggctggtcacctcgtctctgtgggcctcagtttccctatctgtaaactgggggggcggtcacagtaccatctagtcccgatgattatctgtcacaaagatgaagcaaggtggctcagggaacgtgctcagaaacctccctgctttccatcttgtccctggccctccccgacgttggtgttccctttctctctgcctctctgtcccccatagtggtgtgccgagcaggctgcagccctgagcatggcttctgtgaacagcccggtgaatgccgatgcctagagggctggactggacccctctgcacggtccctgtctccaccagcagctgcctcagccccaggggcccgtcctctgctaccaccggatgccttgtccctgggcctgggccctgtgacgggaacccgtgtgccaatggaggcagctgtagtgtcagtgtcacccttcccaccttgtcctgcttagtactttaccctgggagccacagccctctccctggggctccatgagacaccagcctggggaggagatctgggaataactatcagggaggtcttcctggaggcatccagccggcatctggggccttgaagtaggattaggtgatggggatgggactggggagagcaggctcagtgggtggccccgaaagatgcaggagtggaaatgatgaggagccgtgtggggccacagctgcccctactgcgggactgagaacgattcagggcccaaggtagtgggtggtggggccaaataggttggagatttgggatctgcgggcacagggggtggagacatcagagaaggcttcctggaggtggcccggggctggggcttctgggacgtgattagagagggtggccaggtgagtggcctgcagggagcaagggtgcagaggtggcagtgagtgagcctggcatggagtgctgggatagagtagggtccagtgtgggccacctggatactgccacactcagggttcaaatacttagggagaggccctgggaaggagagatccagagaagccttcctggaggaggtgggctgagatctaggacctcccagtaggactcgtcagtgtagacagaagcgagcagggcagaccaggcaggcagcatttggtaggcaaagatgtaggggtgggaatggggtcactctgggtccccagagcctcctccctctggggtcacatgggcagacagaagaatgtggagtggatcgaggggatgtcgggaggacctcccagggtggcccctgcatagtgggacttgagactggacaaggagcagcccccagtggttaggactgaggagggggatgggatttttctccaaggaaacacccttctcaagtactcttgtccctgcccaggagacacccaggtcctttgaatgcacctgcccgcgtgggttctacgggctgcggtgtgaggtgagcggggtgacatgtgcagatggaccctgcttcaacggcggcttgtgtgtcgggggtgcagaccctgactctgcctacatctgccactgcccacccggtttccaaggctccaactgtgagaagagggtggaccggtgcagcctgcagccatgccgcaatggtgaggcctggaggcctgaacggcgagggatggggtgggggtcctggatggctcagacagtccagggttggaatcctggctttgactcttctaaccctagggcctggggacctgaccttccacctgcaagcctgtaaaatgggcaaggagacattccctatctcataactattaatatttactgagaatttactgtgtgccaggccctattctaggcactgaggatacagcagggaatgaaacagacaaagtccctggccctgcctgatagagctgaggtgcctggtgtgctgaggataagcagggaagccagtgtggttatactgagatgaggtcagggaggtgactgaggcacatcttgtgggaccccctgggtcacaagaaggggaactttcacttttcccctgagtgagatggagccacaggaaggttctgaggagagaagagacctgatatcggtgctaaaagattaaatgcggcccggcacggcgactcacgcctgtaattccagcactttgggaggccgaggcgggcagatcacctgagctcaggagttggagaccagcccgggccacatggtgaaaccccgtctctactaaaaatacaaaaaattagccgggcgtgatggcaggtgcttgtaatcccagctactcgggaggctaaggcggaagaatcacttgaacccgggaggcggaggttgcagtgagccgagatcatgccactgcgctcccgcctgggcgacagagtgacactctgtctcaaaaaaaaaaaaaaaaaaaaaaaaaaaaaagattaagtaagatcatgaatgtaggctgaagcagagaattgcttgaactcgggaggcggaggttgcagtgagccgagatcgcgccactgcactccagcctggacgacagagcgagactccgtttcgaaaaaaaaaaaaaaaaagatcatgaatgtaaagggctggctgtgtatcttcttgcgagtgaatacaataattctctcccaaacactgagtgttcattctggggtgtgtggtactagggactcagcaccgaccaggacatctctgggccgcaccctcctgggggaaccagcccagaggggaagacagacaccctcagacagagcccagggtgggtggtcagggctgtgatgtaggagcacagggcagtgatcagggctgggatggaggaaggagcatcggagtagaaacctgaggggtgggctagggaagagaaaaggtgggaaaaaatgtgagaaaaggaggaagggaagagaggaggggtattctaggcagaggaaggccagagggttcaaacacgtagttctgggagctgtctactattgaagtatgatcgaagccgaaggaaaaagagacaagggcaccgagagccaaagaggtggagctgaattaattattccaaaacttcattaggaagaaaagcgagctggctttcctggcacactccaagacgctggcccttaagttagagagaaaaaggggaccccgtgcagcgatgacagagctgggaaacagcgcgggcaggtgggtccccggctcccggactgcgccctctgatgctcccttccccacaggcggactctgcctggacctgggccacgccctgcgctgccgctgccgcgccggcttcgcgggtcctcgctgcgagcacgacctggacgactgcgcgggccgcgcctgcgctaacggcggcacgtgtgtggagggcggcggcgcgcaccgctgctcctgcgcgctgggcttcggcggccgcgactgccgcgagcgcgcggacccgtgcgccgcgcgcccctgtgctcacggcggccgctgctacgcccacttctccggcctcgtctgcgcttgcgctcccggctacatgggagcgcggtgtgagttcccagtgcaccccgacggcgcaagcgccttgcccgcggccccgccgggcctcaggcccggggaccctcagcgctaccttttgcctccggctctgggactgctcgtggccgcgggcgtggccggcgctgcgctcttgctggtccacgtgcgccgccgtggccactcccaggatgctgggtctcgcttgctggctgggaccccggagccgtcagtccacgcactcccggatgcactcaacaacctaaggacgcaggagggttccggggatggtccgaggtgaggggctgcgccacagacgaacgccttgcgctgctggctgcttttacccatctccgtggtgcagttggcccgattccttgatgcatttccctggtcggtctctcttaccccggtagctggttttgggttcccctttgtgatgggtaggggaaaacaagatctgagaatttaaagagtctgagtttttcttctttctctcctcccacagctcgtccgtagattggaatcgccctgaagatgtagaccctcaagggatttatgtcatatctgctccttccatctacgctcgggaggtagcgacgccccttttccccccgctacacactgggcgcgctgggcagaggcagcacctgctttttccctacccttcctcgattctgtccgtgaaatgaattgggtagagtctctggaaggttttaagcccattttcagttctaacttactttcatcctattttgcatccctcttatcgttttgagctacctgccatcttctctttgaaaaacctatgggcttgaggaggtcacgatgccgactccgccagagcttttccactgattgtactcagcggggaggcaggggaggcagaggggcagcctctctaatgcttcctactcattttgtttctaggcctgacgcgtctcctccatccgcacctggagtcagagcgtggatttttgtatttgctcggtggtgcccagtctctgccccagaggctttggagttcaatcttgaaggggtgtctgggggaactttactgttgcaagttgtaaataatggttatttatatcctattttttctcaccccatctctctagaaacacctataaaggctattattgtgatcagttttgactaacgaggctgaatgctttgtatttgatgttggggctgaggggaagagattttgtctcctgaggagaatagtagacaggactctttatgttgtaggggtcggaaacgactcaaactgctttaaatataaaagaatttatggctgggtgcagtggctcacggctgtaatcccactgaaccactgagtgagatcagtgctgaagcaggaggattgcttgaggctgggagttggagagcagctgggcaacacagcgagacccctatacgaaaaattaaaacaaaattagccaggcctggtggcgcacctgtagttctacatacttgtgaggctgaggccgggaggatcgcctcagctcaggagtttgaggctgcagtgagctatgatcacaccactgcactaaagcctgggcaatacagcaagatcctgtctctttaaaaaaaaatgtattagtggccgggcgtggtggctcacccctgtaatcccagcactttgggaggctgaggtgggtggatcacctgaggtcgggagttggagactagcctggccagcatggcagaacctcatctctactaaaaaatacaaaaattagctgggtgcagcggcaggcacctgtaatctcagctactcaggaggctgagaactgcttgaactcgggaagtggaggttgcagtgagccgagattgtgccattgcattctagccttggagacagaacaagactctgtctcaaaaaaaacaaaaacaaaaaacgcattagctcataaaatggaaaaatcctaggggtagatatggtttccagcagcaatggactggggctcttggtctttctccagttgcctcttcttaccccttgattgatttcactgtggggaatctctcattggccctggctcgttggtaggccctcctaaaccagtctccaggcagtatggcttcctctgatttggccaggcttgcttattgcctgttgtgtggtagggagtgacgtcagcctgcccagatcacatggaatatataggtgatggggtgtccctgctcccctcagatcagtttgttcccagaaatgagtactgtgtcaggcaggcaaactgacagaccatcttacaagaaataaggaaactccttagtctgaaagcaggtaacctcagacagtaattcaaatttacaccaaaaaccaaagagcaggctgggtgcggtggctcatgcctgtaatcccagcactttgggaagctgaggcgggtggatcacctgaagtcaggagtttgagaccagtctggccacatggtgaaaccctgtctctactaaaaatacaaaaattagccaggcatggtggcgggtacctgtaatcccagctacttgggaggctgaggcaggagaatcaattgaacctgggaggcggaggttgcagtgagccgagatcactccattgcactccagcctgggtgacagagtgagactctgtctcaaaaaaaaaaaaaaaaaaagcacccgtgacagtaattatgtaattataaggattacagtgggctgggagcggtggctcacgcctataatcccagcactttgggaggcctaggcgggcgtatcacctgaggtcaggagttcgagaccagcctggccaacatggtgaaaccctgtctctacttaaaatacaaaacattagccgggcatggtggtacgcatctgtaatctcagctactcgggaggctgaggcaggagaatcgcttgaacctgggagatggaggttgcagtgagccgagatcgcaccattgtattccagcctgggggacaagagtgagacttcatctcaaaaaaaaaaaagattatggtagccctccgtaatccttgaagcatacgttccaagactcacagtggatgcctgaagctgctgatagtaccgaatgcaatctgaacacatttctgtttatgtcttctacctacaagctgaatgcctttcccatcttgactgagcatttatcacaccctgtggccttggaaactttggcagtttgaggtatgacagtgaaactagcatgaatttccttctctttcttcacaatttgatggctagaatattcaccttttttttttttttttttttttttttttttttttttgagacagagtttcactcttgttgcccaggttggagtgcagtgatgcaatcttggctcactgcaacctccgcctcctgggttcaagcaattctcctgtctcagcctcccaagtagctgggattacaggcatgcgccaccacacccggctaattttgtatttttagtagagatggggtttctccatgttggtcagcctggtcttgaactcctgacctcaggtgatccgcctgcctcggtctcccaaagtgctgggattacaggcatgagccaccgagcctggcctagaagattcatcttaaggccaggcatggtggctcacacctgtaattccagaattttgggaagttgaggcaggagactcacttgagcccaggagttcgagaccagcatgggcaacatggcaaaaccctatctctacaaaaaaaattgaaaaaatcagccaagtgtggtgtcattcacccgtagtcccagctacttgggaggctgagctgggaggattgcttgagcctaggtggttgaggctgcagtgagctgtggtggtgccactgtactccaccctgggtggcagagtgagactgtgtctcaaaaaaataaaataaaaagggctggtcacaatggctcatgcctgtaatcccagcacttttggaggccaaggtgtgtggatcacctgaggtcaggagtttgagaccagcctgaccaatatggtgaaaccctgtctctactaaaaatacaaaaactagctgggcatggtggcaggcacctgtagtcccagttacttgggaggctgagacaggagaatcgcttgaacccgggaggtggaggttgcagtgagccgagatcatgccactgcactccagcctgggtgacagagcgagactccatctcagaaaaaaaaaaaggaaatagctgaggcttctgaggctttgtaatttataaagaaaagaggtttattttggctcatggctctgtaggctatacaggaagcacagtgctggcatctgcttctgctgaggcctcaggaagcttccaatcatgatacaaggtgaagggggagcaagcacatcacatggcaagggagggagtgagaggggggtgccaggctcttttatttatttatttatttggtacagagcctccctctgttgctcaggctgaagtgcagtggcacaatctcggctcactgcaacctccacctcccagattcaagcaattcccctgtttcagccccccaagtagctgggactacaggtgtgtgccaccataccagctaattttttttggcatttttagtagagacagggtttcaccactttggccaggctggtctcgaactcctgacctcaagcaatctgcctgccttggctttccgaagttctgggattacagaagtgagctaccacgcccagtctcaggctctttttttttttttttttttttttttttgagacagagtcttgctctgtcacccaagctgtagtgcagtggcacgatgatcttggctcactgcaagctccgcctcctggattcatccattctccatctcaggctcttttaaacaaccagctctcgagggaacaagggaactcacagagcgagaactcactcattactgtggggagggcaccaagaccttcttgagggtttcgcttcgaaacacctcccaccaggcccacctccaacattggcggtcatttcaacatgagatttggaggggaaaaatatccacaccaaatcaatacccatataagaagccagaggctgggcacggtggctcatgcctgtaatctcaacactttgggaggctgaggcgggtggatcacttgaggccaggaatttgagaccaacctgaccgacatggtgaaaccaaccccgtctctacaaaaacatacaaaaattagccagacatagtggcgctcacctgtaatcccagttacttgggtggtggaggcacaaaaatcgcttgaccccaggaggcagaggttgaagttagccgagatcgtgccaatacactccagcatgggtgacagagcaagactctgtctcaaaaaaaaaaaaaaaaaatggccaggcgcggtgggtcacagtggcggaccacctgaggtcaggagttcaagacgagcttggccaatgtggtgaaaccccatctctacaaaaatacaaaaattagctgggcatgatggcagtgcctgtaatcccagctactcaggaggctgaggtgggataattgcttgaacctgagaggtgggggttgcggtgagctgagattgtgccattgcactccagcctgggtgacagagcaagactccgtctcaaaaaaaaaaaaaaaaaaaaaagccagagagctagctggctctcttcctgccatgtgaggctgcaagaagttggtggtctgcaacttgcaagaggtccctccctagaacccaaccttctggcaccgtgatcacagacttccaatctccagacctatgagaaataaatgtttaagccagtttatagtattttttttaataacagcctgagccaactaagagagttgggttttgctgcaataacaaatttccctcaaatcttactgacttacacaatcacaggtttcttttttgttcatggcacacatccaggccaccaggcttttcgtttttgttcaagagacatagtcttgctcttgttctgtcacccagtctagagtgcagtggtgtgatcatagctcatggcagcctcagtcttctgggctcaagtgatcctcctgcctcagcctcctgagtagctggaactgtgggtgcataccagcatacctagctaagtttcaagttttttgtagagaggggttcctggtatgttgtccagtctggtcttgaacccctgggctcaagcagtccccctgggctcaagcagtcctcttggtttggtctccagaagtgctgcaattacaggcagggttttaccatgttggccaggctgatcgtgaactcctgacctcaggtgatccaccggcttgctctcccaaagtgttggaattaccggcgtgagccaccgctccccatcaggggcttttttttttttttttttttttaaatcagtctctaacactggaacacttttctgcttcggaagtaaaaccatcaggctgttagacacagacacccctctcttggcttccttcaaattactgaaaacaagtctctccaccccctaccgtaccaaccaaccaaccaaagactggccagcacatgctgtagtctcagaactttgggaggccaaggtgggaggattgcttgagcctaggaggtcgaggctgcagtgagctgtgattgcaccactgtgctccagcctgggtgacagagtgacagcctgtcctcccaaaaaataaaaaaatgttttaaaaagtacatgtctgatgtgcttacaaaaaataaaagaagatccttggttaatggccctgccccttactccaaggccatatttgctgtgctcactgtctgggctctagtcctgctgcctccagctaactcctcctttacctggctaaccctttgtctctttattaatgccataaacatttattgagcacctactacatgccagatcttattctgggagctgggaatacagcagtaaacaagacggacaagaccccatccttgaggagctcacagcttgacattccttctcaaagtggttaagccccaggatgctggagcctgacgggttgagtttgaatcccagctctgccatttaactagctgtgggcaaatgtttagcgcctagtactgtaataaatgtgaactctcagccgggcgcagtggctcacgcatgtaatcccagtagtttgggaggctgaggcgggtgggtcacttgaggctaggagttcgagcctggccaacatagtgaaaccccatctccactgaaaacacaaacactagctgggtgtggtggcgggcacctgtaattccagctacttgggaggatgaggcaggagaatctcttgaatccagaaggctgaggttgcagtgagctgagatcatgccactgcactccagcctgggccagagtgagactgttgccgtggtgctcatcatcagtctccagatgtcagttgtccccttttctagtgagccgtctctgattgcagcaggctgactgaacctattctgggatcccacagctcctgggctccctcatccctgccctgaacgctctgggctgtagccctttggtaatgggtatgtgtcccctactggacagggagcctggtgagggcagggaccagggctttcctgatgcctgctctgtccccaaattcacccagcagagaagtgtgcacgcagcaggcactcagtacacatatgctgaacacctgagtgtcaccgacagctgcggaggcactggggcaatctgtgtgtttctcagcctggcgtcgggggttaagggggcgggaattactcggcgaggtcgggaggtcgcgcggtggaacccgggggccaggtggaactcggtgtaacagagcccccagtggtcgcgccgcgtctcagaacccggtgcgggagacgctctccccgcccaaagagggaaggcgggcgggactccccaaccggcttgccccggtccccctgggccccatgaataaccaggcgcggaccccagccccctcctcggcgcggacttcaacctcagtccgggcttctaccccgacccggacaccgactccactccggaccccgactccggtccggactcggacccccatccggaccctgactccagtcctgactccgtctccagccgggacttcccctctggtcctgactcctgctccagcccagattcccactctggtccccactcccgctctggcccggatcccccgtctggttccgcctcctgctccggcctggatccctactccggtgccgactcccgttcccgtccggaacccaactccggtcccgactccggctcggaccctgactcctccagtccgggtcccagccccagccccagcccagctcctggcagggattcgggccgcgctccccgtcttggactcctacctggccccggccctacctttggatccgcccccggaacctgctccggagctgcctttgttgcccgaggaggaccctgagccggcgccgagcctgaagctcatcccgtcggtctccagcgaggccgggcccgccccggggccccttcccacgcgcaccccgctggccgcgaactcacccgggcccaccctggacttcaccttcagggcagacccgtcggccatcgggctggcggatccccccattcccagtcctgtcccctcgcccatcctggggaccatcccgtcggccatctccttacagaattgtacggaaaccttcccctcctccagcgagaacttcgcgctggacaagagggtcctgattcgagtgacctactggtgaggacctcacacatgcctctcccaacccccggggacagggccggcagtgggggctgggtctccggggacgtggaggtcagggttggggtagggcgaggggagggattcaggaagagccccagagttccagttcccagattggaaacccgctcttgtctctcattctctttggggcaggagagcttcaggttcaaatccctgctttggatctgagcttcattcattcgtttctgagtgccccgcgggccaagtgccaggcctgtgctagagatggggtgctgagtagagcagatcgatctactttgctccccagcaagaccaacccaaagacaccgcacatgataggggctctggcttcccttcccagcctctctcctgccctggaagcctctctggccccttgtctctctctctctctctcacttcctcctcttctgtctctgcccacaggcggtctctcccactctctgtctctctgtctccccacctcactctctctctcttttgtttttgtttgtgtttcggacaggtcttgctttactgcccaggctggagtgcagtggtgcaatcactgctcactgcagcctcgacctccagggctcaagcgatcttcccacctcagcctcctgagtagctgggactacaggtgtgcaccaccatgcctgcctaattttttttttttttttttgagacggagtttcactcttgttgcccaggctggagtgcaatggcgcgacctctgctcactgcaacctctgcctcccgggttcaagcaattctcctgcctcagcctcccgaacagctggaaccacaggcatgtgccaccacgcccggctaattttgtatttttttttagtagagacggggtttcaccatgttggccaggctggtctcgatcttctgacctcgtgatccacccaccttggcctcccaaagtgctgggattataggtgtgagccaccgcgcctggcccctaatttttaaattttgttgtagagatggggtcggggatggggtgcgggggcagtatcactatgttgcccaggctgttcttgaactcctacattcaagcagtcctcctgcctcagcctcccaaagatctgggattacaggtgtgagccaccgtgcccagcctgtgtctttcctttcccagagtgttgtgtgtttctgcttctccctatctcggttccctcacctctggcctctttctttctctccatcttatcttttctgtctctttctctgactccatggattcgtgtattcatgtattcattcgacaactacttcttcaccacccaccatgttccaggtcctattggcatcagggacacagcagtgaacaagaccgagatccccgtccttgtggctcccatgggctggtgtggaggggcaagcaaaaaaacaataatatgacctgtagaaaatgatctcatatgtgaggaggtgatccgtactgtgaacaaaaggcattttggggggttgcagttttagctggggtggtcaggaaggcctcactgagaagggggtatatgagcgaagccctgaaggaaggagagaaggagttgtgtggatgctgtggggagagcatttggctgagggaactgccagtgcaaaggtcctgaggcagggcatacctggggtattgaaagatgagctaggggcagggcctataatcccagcactttgggaggccaaggtgagtggatcacttgaggccaggtgttgaagaccagcctgggcaacacggcaacatggtgaaaccctgtctctataaaaaatttcaaaaattagctgggtgtgatggtgcatgcctgtaatcccggctacttgggaagctgaagtgggagaattgctagaacccaggaggtggaaggttgcagtgagccgagatcgcaccactgctctccagcctgggcgacagagcaagactctgtctcaaaaaaaaaaaaaaaaaaaaaaaaaaagcccagcgcggtggctcacgcctgtaattccagcactttgggaggccgaggtgggtggatcacgaggtcaggaaatcaaaaccatcctggccaacatggtgaaacccggtctctactaaaatataaaaaattacccgggcgtggtggtgggcgcctatagtcccagctactagggaggctgaggcaggagaatggcgtgaacccgggaggcggagcttgcagtgagctgagatcgcgccattgcactccagcctgggcaacagagcgagactccgtctcaaaaaaacaaaaaaacaaaaaaacaaaaaaaaaagagagagagagagaaagaaagatgagctaggggcttctgtggctggcacagggtgaatgaattggggagaagtgggagaagatggagacagaggggtgagaaggcagatcctgtggtggcttgcaggccacgggaaggactggtttttcccctgcgtgagatggcactacttcgggattctgaacaggggaggaacatgatctaactcaggtgttcatagggtgccctgagctggggaagatactgatgcggtgtcttccctggtctctctcttaactttctcctcctgctcttggcctccagtggcctctgaagctatagccttcgggtgagtagttttggctttggaggtagggggagcctgaggcaggaagactgggaggagtccctgtttcccctcccctgcaaccccatgaccccatctcctcccctcagtacattctactgaaaaagagcctggagcagcaatttccgaatcacctactctttgtaagtgtgtgggggtcctgggggagaggggggtggtcagggatctgagatccccaaggggcttggaggagagagcttagcctcccctacgctcaccatttcctcccaggaggaggacagagctgcccaggctacaggggagtttgaggtgtttgtgaacgggagactggtccattccaagaaggtgatcctgagtaaaggtccgggacagggaggtggggtggtgctgaggtcctgggggtgggagacctgtgtgctttcttccctctgtgcccagaggggtgatggctttgtgaacgagtccaggctgcagaaaattgtgagcgttatcgatgaggaaatcaagaaaaggtagccggcaaggggtggagctggaggtgagcgtggagctcccaaggctgcggtgggaggggtggaggccgggtaggaggatggggcagggctctgtctcagtcctgatcctagctcagccggttctcactgttagaatcatgacaagtcacctacattcttttctgagcctcagttgcctcatctgtaagaccctggggtaggactgtgttcagtgagtttgaaaaatagcaaggaggcagggcacaagtctagcactttggatggctaaaatggcagatcacttgagcccaggagttcgagaccagccagagcaacataatgagactctgtctctacaaaaaataataaataaataaataaataaataaattagccaggcacagtggctcacgcctgtaatcccagccctttgaaagcctgaggtgggtggattgcttgagcccaggagttagaggctgcaatgagctctgactgggccactgcactctagcttgggtgacagagcaagaccctgtctctacaagaaaaaaaaaaagtgccgggcgggatggctcacccctgtaatcccagcactttgggaggccgaggcgggcgggtcacgaggtcaggagatcgagaccatcctggctaacacggtgaaaccttgtctgtactaaaaatacaaaaaattagccaggcgtggtggcgggtgcctgtagtcccagctactcagaaggctgaggcaggagaatggcgtgaacctgagaggcggagcttgcagtgagctgagatggcgccactgcactccagcctgggcgacagagcgagactctgtctcaaaaaaaaaaaaaaaaaaaaaaggaaaagaaaaaatagtgaggaaactagaatgggcattgtagtccatggaaacagtataactgcctgaggcatggtagaccctatataaacacttatttttatatggagctgtcattgttattgttatttaaaattcttttctttctctcccatcttaggagtctcagctggatgatgagaagggctgaaatgttgccaagtcaggtccttttctgatggtggctggggctggggtgagctcagggaggggaagaggagaatacatgcagagtcagcacccctgtgtccagtctgactgtgtctgctgtcgccacactcacctctgaggtctgtggaagtcacctgatattctggccccaggggtgggagggaggggagcttggaaggctagtcctgtagctccagtcctctgtctggcctccactcctcttgctcctgagggcagtttgtttcttttgtggattcgtcatttcccatgccctggttccagatacattttgaaaaccttccatcttattggcattttctggggttgtgagggaaacggggatggcagtcagactcaaacccgtgacactccaaactcgattatgctccagggcccactttctaaacctgtaagatctatgttccagcctgcgcaacatagtgagaccccaactctacaaaaaataaaaaattagccaggtgtggtggtgtgtgcctgtggtcccagctatttgggaggctgaggcaggaggatggcttgagcccaggaggctgcagtgagccatgattatgccactgtattgcagcctggacaacagagtgagatcctgtttcaagaaaaaaaaaaaaaaggaaaaaaacccataggttttagaatgccagtgttgtagggagcgtctctgtgacctggggctggaggagaggcattttcacattcattggacatttatgggctccgtactctgcacctggcatggtggggtcagtggtcacatgccaggaggtcaagggcaaaggcagggggggctcagactttaccacttagttgctgtgtgaccaccaccaagggacgccacctctctgagcctccatttcctcctccataaaatagacgtcatagcactatttaacttgtggaatttttgtgataattacatactaaattatgcttgggaaaggattagcagaaggcttatcacagaattagtaagtttcagttagtagtagatttcagttaagagtgcttttgcctactagtaacagcagacttgactgccaatggctcacacagcagacttgactgccaatggctcacacagtagaaaacacaaattctgttttgtttgttttttgagatggagtctggctctgtcacccaggctggagtgcaatagcacaatcttggcttactgtaacctctgcctccctgggtttaagcaattctcctgcctcagcttcccgaatagctgggattacaggcatgcaccaccacacccacctaatttttgtatttttagtagagatggggttttgccatgttggacaggctgatctcgaacgcctgacctcaagtgatccgcccacctcagcctcactgctgggattagaggcgtgagccacctcaggcctgatgttttcaacacctgacaggataatgtgctggccctgtacatacaaatgatatgctggtgtgagtaggaaataagttatctatcatgcctgctaagacagagtgctggagggtaggggaaagtcccaaaacatatatggggtttgtctcagtgaaatctgtatgtgtcaagcagtataaaacatgagaggatatttcctatgtgaaagatactttccaccccctacagttagggatttgttttttttttttgagacaagagtctcgctctgtcacccaggctggagcgtagtggcatgatctcagttcactgcagccttgaactcctgggctcaagcaatgctcccacgtcagcctcccaagtagctggggttacaggcacgtgcgaccatgccaggctaacgatttttttttttttgagacagagtctcactctgcccccaggctggagggcagtggcgcgatctcagatcactgcaacctctgcctcctgagttcaagccattctcctgcctcagcctcctgagtagctgggattacaggcgcgccccaccatgctcggctgatttttgtatttttaatagagaaggagtttcgccatgttggtcaggctggtttcgaactcctgacctcgtgatctgtctgcctcggcttcccaaagtgctgggatttcaggcgtgagccactgcaccaggcaggctaatgatttttgtatttttagtagagacgggggtctcctcatgttgcccaggctggtcttgaactcctgggctcaagcaatacacctgccttggccttcggaagtgctgggttacagacatgagccaccatgcctggccaggggtttgctttaatcacacttttatgaacttggtgacaccaccctggttcagaacgcctaacatacctcataaaatatttttattttttatttttttgagacggagtctcgccctgtcacccaggctggaatgcagtggtgcgatcttggctcactgcaacctctgcctccctggttcaagtgattctcctacctcagcctccagagtagccaggattacaggcacccgccaccacgcccggctaattttttgtatctttagtagagagggggtttcaccatgttggccaggctggtctccaactcctgaccttgtgatccgcccacctcagcctcccaaagtgctgggattacaggtgtgagccactgctcccggcctaaaatattttaaaaatatttttaatgcaaaattgagctggtgggaaggtaagggaactcctggagtccagaaatctcacagaaatataaatccaaaagtggttggtgttggagttggtacttgctgtgaggaaatctgctaattttgatggcaagaacctgcatgactcaaaatgtaaagggaaaagacagaacccaaggcccaagcgggatgagatgccagagtggagaccatgtggatgccgggaaccccaggaggcagtaccctccagtgggtaggctgggaaaaaatgcccctctcacagaggtaggcagttggggtgattagcagtctccaccttgttagtgagcaaatgattgaaagaaagccttctgttaataagcctgcactcacacaaatttgggacctaaattcctgccatctgacaagtctgaaatttcatctaaattaatgtctggttaggaatgttcccaagtatgtgttatgattaaacagaagtcaactaagaagatgctgaaccatttcccaggtagttcccaaagataatattttgaggaacatgagttagcaattaaaaggagccaggcatggtggcttacacctgtaatcctagcacttagggaggcagaggcgggaggatgacttgaggccaggagttcaagactggcctgggcaacatagggaaaccctgtctctacaaaaaatacaaaaattagcccagcatggtggcattcgcttgtagtcccagctactcaggaagctgaggctggaggattgcttgagcccaggaggtcgaggctgcggtgagccatgattgagccatgattgtgccaccgcattccagcctgggcgacagatcgagagaccctgtctcaataaaggaaaaaaaaaagtcctggcgcagtggctcacgcttgtaatcccagcactttgggaggccgagatgggcggatcatgaggtcaggagatcgagaccatcctgactaacatggtgaaaccccgtctctactaaaaaaaagaaatacaaaaaattagctgggcgtggtggtgggcacctgtagtcccagctactccggaggctgaggcaggagaacggcatgaacccgggaggcggagcttgcagtgagctgagattgcgccactgccctccagcctgggggacaaagcgagactcatctcaaaaaaaaaaaggaaaaaaaaattgtcgttaacataaaagtcattaaagtaaaaaacagtattagatattgtcgtatagtagagaatttagttggcctttgtgtccagttgctgggagggactctttaaatccttggcatttcccaagtgacaggggtgcaccgttaacatggtggaccccttgggccatacttgatagtttttttgttttttttttttcggaaatggagtctcactctgtttcccaggttggagtgcggtggcacgatctcggctcattgcaacctccacctcctgagttcaagcgattctctttcctcagcctcccgagtagctgggactacaggtgcacgccgccacgcccagctaattttttttttttttgtattttagtacagatggggtttcactgtgttgctcaggctggtctcgaactcctgacttcaggcaatccgcctgccttggcctcccaaagtgccagaattacaggtgtgagccaccaccggcccatatttgatagtttagactcaaaaggtgactaacggtgcacttccacttcttgtttatggtaattaggtgaatcagaatggcagctgtcagtgacagaagggccaccatgagcttatgagaaagctggactttgagccacgtggtatcagcttgacagtctgggaggggaaggaagctggagattgagtttcagttccatgaccaatgatccagtcaatcacgcctgcataataaaaccccaataggccgggtgcagtggctcatgcctgtaatcccagtactgtgggaggctgaggtgggcggatcatctgaggtcaggcgttggagaccagcctggccaacagggtgaaaccccgcctctactaaaaatacaaaaattagctgggcatggtggcacatgcctgtaatcacagctactcgggaggctgaggcaggagaatcacttgaacctgggaggtggaggttaaagtaagccgagataaggccattgcaccccagcctgggtgacagagcaagactccgtctcagaaaaaaaataaatgaaaaccccccaaaaaaactttgtgcacgcaggcccagatagctttcccagctaggaatactctgcgtatcaccacaaatccatgtgccagaaaactgatgtgtcctgcctccacagggagaggacgtggaaactgtgcactgggaccatcccagacctcgccatgtgtgtgtttctttcttggctaatcttgatttttatctttttttttcttttttttttgctataataaaactataaaatcatagcactttccccagttctgtgagtcactctagtgaattattgaccctgaaggaggagtgggaaccccctgaatttgtagcctgttggtcaggagtaaggaggtctgggaaccccagagcttgtggctggtgtctggagtgaggacagccttgtggaagactgagtccttaaacctgtgaagacgaatattcactcctagtgtcagaattgcatcgtagacatgaagtagtaactacagaataataaacattttaattgggcaggaggatggtacaattctaaactgtatgtacctattaacagcttcaaaatacgttaagcagcagggcgggcgcggtggctcacgcctgtaatcccagcactttgggaagctgaggcgggctgatcacgaggtcaggaaatcgagaccatcctggctaacacggtgaaactccatctctactataaaaaaaaatacaaaaaattagctgggcgtggtggggggcgcctgtagtcccagctacctgggaggctgaagcaggagaatggcgtgaacctgggaggcggagcttgcacgtgagtcgagatcgcgccactgcactccagcctgggtgacactgcaagactccgtctcaaaaaacaaacaaacaaacaaacaaaaattagccgggcctggtggtgcgcgcccgtaatcccagctactcgggaggctgagataggagaatcgcttgaacccaggagggggaggttgcagtgagccgagatcgcaccagtgcactccagcttgggcaacagagtgagactccgtctcaaaaacaaaacaaaacaaaaacaaaatacattaagcaaaagttgagaaaactatagatcatattataatgtgaaattgtcaaatacacctaaattagagacaggtgaaactgacaaaaaataattcaggatgtagaagagtgtgtagaacataaaccacaagcctgatctaatgaacaaatgtatataattgtatctaacaattggagaatacctttctgcacaaatgaaatatttacaaaatgtaacaatgtgttgtgccataaagcctccatacattttaaataatttgcgtcattcaaaccacattctctgaccactatgtacttaagtcagaaatcagtaacaaaagaaacataaaaatctgaacatcttcaggaattaagaaacacacttctttttttttttttctggcaaaataagccagaaagtgctacatcacccaggctggagtgcaatggtgcgatctcggttcactgcaacttccacctaccgggttcaagtgattctcctgcctcagcctcccgagtagcagggattacaggtgcgtgccaccacacctagctattttttgtatttttagtggaggcggggtttcaccatgttggccaggatggtctcgtactcctgacctcaggtgatccgcctgccttggcctcccaaagtgctgggattacaggcgtgagccactggacccggccttttttttttttttttgagacagtcttgctctgtcacccaggctggagtgcagtggtgggatcttggctcactgcaacctccacctcccaggttcaagcaatccttcctgcctcagcctcctgagtagcagggattacaggagtgccccaccacatccagctaatttttgtatttttagtagagacggggcttcgccatgttggccaggctggtcttggattcctgacctcaagtgattcacccgccttggcctcccaaagtgctgggattacaggcgtgagccacagcacctggcctgaaaatgctatattctaagtcagtagagaaatactaatactcagacaagtaccctacaaactctattgattttatctcacaggaaaaagaaaattatcaatgaactactctcccaaaaagcattagccctgaatggttttcagaataaaaatctgtgaaactttaaaaaccagataattccaatgccagctttttccagagcagggaaaaaataaaatacttctgtactcttcatatgaaatgatatatatgaaatacagttgatctaaatactgaaaaggttgataaactagaaactaatttcacttatgaattctaatacaaaatcttaaataaaattttattttattccataaaataaaatggaattcaatatcatactaaggaataatgtattatgtctaagtgaggggcatttcaaatgcaaggaccattactacaaaacctatgaacatgatttaacatatgaatatactgccgggcgaggtggctcatgcctgtaatcccagcactttgggaggccaaggcgggcggatcacctgaggtcaggagttcgagaccatcctagccaacatggtgaaaccccgcctctactaaaaatacaaaattagccaggtgtggtggtgcatgcctgtaatcccagctactcaggaggctgaggcaggagaattgctggaacctgggaggtggaggttgcggtgagtggaggttgtgccattgtactccagcctgggcaacgagagtgaaactccgtctcaaacaaaaaacaaaaaacatatgaatacatcatgggagaaaagagatccacaaacgcggatctgacctttaacaacattctctaccagttgggcgcactggctcacgcctgtaatcccagcactttgggaggctgaggcgggcagattgcctgaggtcaggagttccagaccagcctggccaacatggtgaagccctgtctctactaaaaatacagaaattagctgagtgtggtggtgggcgcctgtaatcccagctattcaggaggctgaggcaggagaatcgcttgaacctggggggcagaggttgcagtgagccgagatggtgccactgcactccagcctgggcgacagcgagactctgtctcaaaaaaaaaaaaaaaaaaaaaaaaaagaacgaggtaaaactattgttctttgtagatgatatgattgtataccaaagaaaagctactgcaaacaataagagaatagagtaagtttaatagagcaccaaaaaaaaaaaaaaaaagatagcattcaaatttacacaccataaaacctcatttacaatagccataaacaacaaacagaaaaccaaacaaaccttggaatatttttaacaaaaatatgcaagacctatatgaaggaaactttaaaatacatctggggacaaatgaaaagacttaccacattactggataggatgacatcgtgaggatgtcaattctcactcaacagtatatatattgaatgcaacctatataaaaatactaacagcttttgtaaaaattgaaactagtcaagatgatcctaaagttccacaatagaaaaaaaaaatcaaagaacagcctgaaaaactttggaaaagaagagcaatgagggtggactagcactactaggacctaaaacattccaaatgaataaaaattgtaatgttaacatttaaaacttaaaactattcatgagtgtggggggaaggtagggtgcaacctgaggcaaaaaaaaaaaaaaaaaaaaaaaaccaaacaaaaaaccagattccttcatgatcctgcagtggcaaagacctttcttttttttttttttttttttttttttgagatggagtctcgctctgtcaccaggctggagtgcaatggcatgatctcggctcactgcaacctctgcctcccgagtgcaagtgattctcctgcctcagcctcccaagtagctgggattgcaggtgcgcgccaccatgctcagctaatttttgtatttttaggagagatgagtttcaccatgttggccaggatggtctcgatctcttgaccttgcgatccgcccacctcgggctcccaaagtgctggcattacaggagtgagccacacccggccccatgactcaaagtctagaaaccgcaaaagaaataaactgaatatacacagctacattaaaaatttttttctctttttttttttttgagacggagtctggctgtgtcgcccaggctggagtgcagtggctcaatctaggcttactgcaagctccgcctcccgggttcacgccattctcctgcctcagcctcctgcatagctgggtctacaggcgcccgccaccacgcccggctaatttttgtattttcagtagagacggagtttcgccgtgttaggcaggatggtctcgatctcctgaccttgtgatccgcccgcctcggcctcccaaagtgctgggattacaggagtgagccaccacgcccacccaacatttttctgcatggcaaaaggatcacagcagtctgaactgctgtgaactatattccatgtcatcacaaagggctaacttctttagtgactgacacataacttacaagccaataaaaaataagaatatggacagatagttcgctgagaaatgaaaacaaatggctcttaagcatttgaaaacatgcgtcctcactcgtaattagagaaattcaaattaaaaccatagtgagaaaccatcttttactgtcagatgcttccaaagctgtcagattagccaggccgtggcgagaggcacaactatccctggctgaatggaaggtaaactggttgagccccaaggacagcactctggtgacacattaaaaataccaaggtggggccgggtgcggtggctcacgcctgtaatctcagcactttgggaggctgaggcaggtggatcacgaggtcaggagttcgagactagcctggccaacatggtgaaaccctttctctaaaaaaatacaaaaattagctgggcacagtggtgcacctgtagtcccagctactcggaggctgaggcagaatagcttgaacccgggaagtggaggttgcagtcagctgagatggtgccactgcactccagttcaggcgacagagtgagactccgtctcagaaaaaaaacaaaaacaaacaaaaaataaggtggctgggtgcggtggctcaaacctataatcccaacactttgggaggctgaggcaggcagatcttgaggtcaggagatcgagaccatcctggctaaccggtgaaaccctttctctactaaaaatacaaaaaattagccgggcatggtggcacgtgcctgtagttccaggtactccagaggctgaggcaggagaatcacttgaacccaggaggcagagattgcagtgagctgagattgcaccactgcactccagcctgggtgacagagcaagactctgtttcaaaaagaaaaaaaaaaaacagtgtattatggaaaacgagtaaacacgtataaatgcatagaaaatgttaaaacattttgcaaacaacccagatgtccaaaaggtgtctagttcattatactaagataaggctttacattgtagttgtaaaaaaaaaaacgcccagtggagtagctcacgcccagcacttagtactttgggaagccgaggcaggaggaacagttgaagccaagagttggagacaagcctagaaaacataatgaggccccatctctgtttctatatataaaaaaagaaaaaaaaaaccctgatatataaatctctccatatataactgaaaaaacccaagatgctgatagaggtatacaatatgttaccttgattttatatttttaaaaatttatacctcgtgatgcaagttaactaccttgatattaaaagggaaaatgcacaatatttagattgatgtttatttgcatatgcattagaaaacctgaaaggcgtacagtgaaaaagcaaaaaacaagcaaaaccaagaaaacaacaacaaaactccaagccacaagcaatggcacctgcatggaatagttctgagtttggcaaaggacagcaacaagagagatttctcacagcatcttttgatactttttttcttttttttgagacggagtcccactctgttgaccaggctggagtgcagtggcgtgatctcggcttactgcaacctccgcctcccaggttcaagtgattctcctgcctcagcctcccgagtagctgggactacaagcgcgtgccaccacacccagttaattttttatttttcgtagagatggggtttcaccatgttggccagggtggtcttgaattcctgacctcaggtgatccacccgccgtggcctcccaaagtgctgggattacaggcgtaagccagtgcgcccggccgatacttttttttgttgagtcttgtgaatagaatacatattctagaataaaataaaaagcttaaaattaacaaaaaacaagtttattccacacctacccaatttcacatagacttgaaaacactgatcatataatacgtggttttttctattgaatatttactgttcatctaaagtacctcagaaaacacaaatatgaatcttacactaggatttgttgacatgaccacaaattgtgaaatttcaaagtcctctcaatagccttccaatcctagtaactcaggtacacctggattcctgacaactctatttctttgttttctttcatcacttaggttcatttctatgggttctgttattggcattttttttttctcatatctttgcaaaaccatcctttatggtgaaagtcatgaaggattcttcacaaatgcaggaaaatgcattgctaacaaagtgctaagtcagaagtgtcttgggacctgtttgaaaacaagattcggccgggcgcggtggctcacgcctgtaaagtaatcccagcactttgggaggccgaagcgggaggatcgctcgggtccaagcgttcgggaccagcctagggatgcgagactcccttctctatttaaataatactaaaaaagaagaaagaaaacaagattcaacagtcttgtctgtttccatttcggagtgtgcttcctccttcaattgcacattgccgtattcccttccagtttgcattccccctaatgactgagttaactaaactggcacagcctgcctgttcttttgatcccaaaagggtcacttggctattccttgccaccaatgtcatcatcacagccgactcagtcggccagaggactgagggcctcggaggcagtcagcgctaccgtaaacgcgacagcagcgaagtccatctgcgggggatccgcgtcaaaggctgcttccctcgccttgcagccttccacaaacagcctgcggcgttcctcgaaatcccgtagtaatctgaccggaatcatggagctaccatccagatactcgcggaacaacagctgccggttaatttctaagaaagcgagctgctgatgggggtctggcgcggaggccaggcccgggacgctgctggggatgggcccgggcacagggcccggcatccgcgccatggaccgcgcagcttcggccactgggccttcccgagcctcctgcacccgaaccccgccgccgactgccccccgcagtacgtcgctgacgccactcgcggtgcccacctgtgggacactgctatctccggggagctcggacatctccaacagcccagtcggctccgccatagtcccagcgtttctacggagactggaataacggcactgcactgctgtatgcgagacctgcgcatgcgcgagtctcagtgagcgcgtaaacgctgtgcgtgccagagtgtgcgcatgcgtaagcacggtggccaatcctctagcgttccctagcggtcctgagtagccattacgtctgtagccgcctctggtcctctgagcgcctgaggacctgcggactgcgcggtatcttaaattacaaccacttcagtattaatgtaaagttccttatacggtcattttccagctcctgtcttttttttttttttttcagactgggtctcgccctgtcgcctaggctggagtgcagtggtgcgatctcggttactgctgctttgacctcccagcctcaagccatcctcctgcctcagcctctggagtaactggaactacaggtgcacacaaccacacccagctgattttttattttttgtagaaattgggtctcactatgttgcccaggctggtctcgaactcctggactcaagtgatcatcctgccttggcctcccaaagtgctgggattaccggcctgagccactcggcctggcctgtaagtaatattttgacactggaagtttgggggtttcccaaaaccacctttaggtttgataattcccagagctcattgaaatctgttatattcacagtcatgcttattacaggcaaaggacacagattagaagagatgtataaggcacaatctgggatggggagggttccaaatgtgaagttcctgtgttcctagggatgtgttaccctttgtcgtccatgtgtggcaataagtgtgggggtagtgctaacataggactctcacccaggctttggtgtccagagtttttactggggttttactacctaggcatgcttgattaaaccatcgtccattttgttgaagtcaatctccagcctcctacctgatatcacatggctccaagccccaactctctaatgatatggttagcctttctgtgtggctagctctgatcctgatgataacccaaaacgtgaaagtctatgttccatttaaaatcagtcagctgtggctgggtgtagtggctcatgcctgtaatcccagcaagttgggaggcaaaggtgggaggatcgcttgagcccatgagtttgagaccagcctgggcaacatagtgagacccctgtccctacagaaaaaaaaaattaggcaggcatggtggcatgtgcacctgtagtctcagctattcaggaggctgaggtgggaggatgacttgagcttggtaggtggactgtgcagtgagctatgattgcaccactgcactccagccctgtatgacagagcaagaccctgtctcgaaaaaaaatcctttgaatttagctggaatccaaatatgagagttgctggcaattgaacttcaggaggatccatctaaaaattctgacctatcacaggtcgtgtctgggagctgattgggttggaaatcattctgactcacgtgtaccttactttgtttctacagttctcttggagagatggagttctcctacatgtgacatatatgcttcaaaaagcacatttgtgatattccacagaagacaaaagaaaggacttctctggaaggtaacttcaaggggacaacaacagagctatggactgcaggaagatggcctgcttctcttccagtgtgatttggatcatggccattttgaagcctttgaactgggattagttgctgggctgggtcatcaggaacttgcgtgtccatctcagggagacctggccttcagaaatgacagcattcggccccaggaggagcctgcaattcggcctcagtcttcccagcgtgtgctgcccatggggatacaggacagtaaggagctaagcagaacctgctgcctgaatgggggaacctgcattggggtccttttgtgcctgccccccgtccttctatggatggaactgtgagcacgatgtgtgcaaagagaactgtgggtctgtgctccatgacacctggctgcccaagaagtgttccctgtgtaaatgctggcacggccagctctgctgctttcctcaggcattttactggctgtgatggccttgtgatggatgagcatctcatggcttccaggactccagaactaccaccgtctgcatgtaccacttttatgctagctggcatctgcctttctatacaaagttactattaattgacactgacctatttccagaaataccattttagatatcatgcaaatttcatgaccagtaaaagctgctgctacaatgaaagatgatcatttgttagtttacttaaaataatgagtatatttccaaaatggtctctaacatttccttacagtatcaacaacttcttacttctttgccctgccctctcccaaaaaacgacttcttttttcaaaagaaagtcagccatatctccactgcacccaagtccagtgtttctttctttttttgagatggagtctcgctctgtcacccaggctggagtgcagtggcacgatctcagctcactgcaacctctgcctcctgggttcaagcaattctcctgcctcagcctccccagtagctgggattacaggcatgtgccaccatgcacgactaacttttttgtatttttagtagagaccgaatttcaccatattggcgaggttggtcttaaactcctgaccttgtgatctgcctgccttagcctctcaaagtgctgggattacaggcgtgagcaactgctcaaggcctcgtgtttattgatacatgtaattctaccaaggtcttcttaatatgttcttttaaacgactgaattatatcttcagattattaaagactaatcttaatgtggaccttaggatacagttttgagtagagttgatcaaaatcaattaacattgtctctttaaaaggaaagacagcctctttaaggcgaggaaccagagtgatgaaggaatggaagtctgtctgcatgtgtgcagggagactgggtaagaaagaggaagcaaatgggagagagaggttggaaaacataaaataggttatttaactggtgattaggtgggtgtagagaagcaagttaaaaggctaaatggaagggcaagtttccatcatctaatgaaagatatataagacaaggactcccctttttttcctaaaggcattgtaaaaagaattgatttttagacggagtctcgctctgtcgccaggctggagtgcagtggcgcaatctcggctcactgcaacctctgcctcccaggttcaagtgattctcctgcctcagcctttgtaaaaagtctttttagaaaaaatattatacctcaatgtccccaacaaaattgcttaataaattatgcttcctccaagctatgcaattcttttaactgttgtagaagagaaaatgttcagtgtatttagttgtaaaccaagtgataaaaccacatattgtaaagctcatttaaaaaatacattgtatatatgtgtatgcacagtaaaaatggaaaatatattgaaaaaaaatttgatccttatattgtacctgagaataaatttcaaatggctcaaagattcaaatgtggacaatgaaaccacacacacacacacccaagactaccttaggattcaaaatactgcaggtttatttattttttattttttgagacaggatctcactttgtcacccatgctggagcttgctgggctcaaacgatccttctacctcagcccccagagtagatgggattagaggcttgtgccactacaccaggctaatttttcatatttttcatagagacagggtttcgccatgttgcccaggctggtcttgaactcctgagctcaagtggtctgcctgcctcagcctcccaaagtgtgggattactgatgtgagccactgtgcccggcctcctgcaaatttaaaggaaaataggcaacaaaaattaccatggccaaaggctttccaaaaagccaaaatctaatgacaacttgtgaaaaaatattcgtaactcatatcccaagctattatcatacctcatatcactaacatgagtatcataaatagctactggattcaatgaagaaaggacaaaattatctgggaggggaatggataaagaatatgaacaaggcatggtggctcacacctataatcccagaactttgggaggccaaggagggaggatcatctgaggtcaggagttggagactagactggccaacatggtgaaacccatgttaaaaatacaaaatgagccaggtgaagtggcatgtgcctgtaattcccgttatttgggaagctgaggcacgagaatcgcttgaacctgggaggcggaagttgcagtgagctgagatggtaccactgcactccagcctgggcgagagagtgagactttgtctaaaaaaaagagtatgaacagagagtttatggaaaagggaatatatatgactcttaaaagatatttaactggctgggtgcggttgctcacgcctataatcccaccactttgggaggccgaagtaggtggatcacctgaggtcaggagttcaaaaccagcctggccagcatagtgaaaccccatctctactaaaaatacaaattagccaggtgtgttggtgcatgcctgtaatcccagctcttgggaggctgaggcaggagaatcccttgagcctgggaggtggaggttgcagtgagccaagatcgcacaattgcactccagcctggacaacaagagtgaaactcccatctcaaaaaaaaaaaaaaatttaacttcgctcatcataaaagcgaattaaaactgatataccatttttcaactatcagattcgcaaaagccagatattattgatgatttagtgtgttggctgggctgtaacgaaacatctatgatcattaattgctggtgggagtgcaaagcaggacacatatagaatgctgcatagcaatattcataaaatctcaaaggagtaactttggcccagaattctcatttctggggcatcagcctacagatattacatgtaaaaaggaatctaggtagctattgatcatgagacacatcattagggctgggcgcggtggctcacacctgtaatcccagcactttgggaggccaaggtgggcagatcacaaggtcaagagatcaagaccatcctggccaacatggtgaaaccccgtctctactaaaaatacaaaaattgaccaggtgttgtggtgggcgcctgcagtcccagctactcaggaggctgaggcaggagaatcacttgaacctgggaggcggaggttgcagtgagccgagattgcgccactgcactccagcctggcgacagagtgagactccctcttaaaaaaaaaaaatcactagtttcgtgaaaacccaaggaaaaaatgatctattacagcatcaaatataagatgcacccacatttcagagatgttcaaatatgaagtgaattttgaattgaagcaatactatatttgtgcacatgccacatgatatacaagatgaactactctagcaattgtacaagatgaactactctagcaattttttattctgcccaaagaaagagatgggaaacaacctaaatgtccgtcaatatatccctggttaagtaaatttggacataacctcagaatggaataaaatgccactttaaaaaataatgaggaaatacagtggtttggaagggtcaacatatgttcttaatgagaaagcaatgtataaaccagtaaatataatatgccgacttctgtgaagaaataaaacaagtaaacccagatttatatgtgcctgtgtacacgtaaggaaactagaaggacggaaaggaaactgtggctattagaggtcatcgttggtactggatggaggaaaacaagaatggaaggcttttcgctgtatattttatatattttttggcttgtgaatagattttttaataccaaaaaaactttaaaaattaaaaattgaaagaaaaaagtccagaaatttgacgttcttgaaaacatgatttatcacataatatatacatttactttgcttgtcacttgaaatgcctaagaaaacacaaaatcaatcttaaactagaaacttctattgaatatgacatgaagagagcacatattccgacaatttcaagttcttttcatagccttccagtcctaataactcagcgttaacatcttattctgttcagcactatttgataatttctttcatcctcatgggctctagtattgatgtttcatcagtctcaattttataaaaccatcctttactttgtaataaagcaatgctgagagacattttccataatgcagggggaaaaatgtggatcaatcacaaactcaaagaacgttacagttataatgctttcgacatttttttctacttctgtgatgctttttcaagataagcttccccctccccctttttttcccctccacctgtgcactgtcttatcgcgatatactcttgacttctgaaaatcaagttgcaggattggtatgactggaatgcagaggttctcttgaagtagtgtcaccacataactattctctattgataaacttatcgcaaccaagttcttctatcagagggttgataacttcagaggcagtcagagctatcgtaaaggttaaaatatcgaggtccaccctgtgaggatttcgctgatattcggcatcaaacgctgcttcccttgctctgcaggcttccacgaatcgcctgcggcgttcttcaagctcttgtattctgccgggagcaatcgggtaattttccagatagtggcggagaaactgctggtaattgatgcctaaaacgctaagtgggtggcggagacggagatagggcaacgcagccaggcctccgttcccgtgtctggacctgggcctgccctcgggaccctcttcgtccactggctcccccagcaagcgggcgacctccgccatccgggcttccctggccgccgccgccgccgggctttccctgcccgccgcggctgccctggccaacgccgccgctgccaccggggctcccctggctgccgccgccggggctgccctggccgccgccatccgaccttccctggccgccggcaccgggcctcccctggccgccgccatcgcgccttccccggcctcctcaggctgtgccggggccggctcccgcctcccgcggcctacctccgcctgcgggacgtctctgtcaccattcgccgcgcctgtctgcgggacactgctgtctgcgggcagcttggacatctcagaccgtggggtcaactcggctgctcccagagaaactggaataactggacagagcgatgcccggcggacaccccagtgcgcgtgcgtgggcgctatgcgcgctgtaaatgcagtgtgcgtaaccgggcgcgagagcatagattcttaccgcaaaccctgggagcagtgcgcatgcgtactttcccggcgcccgccgttctccagatgccccctcgaggccgggaagcgccaacgcatctgaaacatcccaacgacgaagggcgggggacatttcaaccagtttgatgtttatgaggaacgcttacaagatcgcttcttgtaggcgttctcaaggttctgtcctagggtgtttctctttgttctccagtgattatgtgccacctctattatatatcaagatattttagattcatggtcttttctggatttttaaattgtttttcattcattcctttgcctgtcttcatccatacggatcgtcctagctaccaaagctttgtaattacagtcttttcgtgttatctttaacattgcattgactaccttggacatttgtttttcgaatcttatttgtgcaatataacatgcagaaaagtaaacaaaacataaatatacagctgaatgatttatcacaaagtgaacatccgtttaactaccacacagtccaagaagtggaatatttccagcatcccagaacccttcctcttcttcttatcactatcctttcctttctacgcagaagtaacaactatgctgatacttatggtaatcactttcttgtttttcttttcattttaccacctaagggtgcattcctaatgctgtagtttagtttggtttgtattctgaactttatctatgtgagaaacacactcacctgcgtaatttttgtatttttagtagagacgaggtttcaccatgttggccaggatggtctcgatctcttgacctcgtgatccgcctgcctcggcctcccaaagtgctgggattacaggcgtgagccactgcgccggccactttcttcccttttatgggctgaccccgcctctacattctgttcccttattgtgaccttctaggtggatgagccctgcagtttgttatatttgcaggctggctgccagtacttagatttatcatgcctcagaaatggaccatttaaaatgttttctcacatacacacttgtatctgtttttttgtgcattatttttatgagattcatccattcacattttctcttcctccctccctccctcactcccttccttccttccttccttcattccttctttctttcatctcattctgttacccagactggagtgcagtggcacaatcacagctcaacgtggcctcaaccttccgagctcaaataatcctcccacttcagtctcctgagtacctgggactacaggtgtacaccaccacacccagttaatttttaatttttttgtagagacagggtctccttatgttgcccaggctggtctcaaagtcctgggctcaaacgacccgcctgtctcagcctcccaaagtgctgggattatagggtgagccagagcactcggcctccagcctacattttcattatggtttataaatactttattttcttgatagttattatattcattaccattttttttatgaagtctcgctctgttgcccaagctgaagtacagtggtgtgatcttgggtcactgcaacctctgcctcccagttccagtgattctcctgcctcagcctcctgagtagctgggattacaggtgcgcgccaccatgcccggctaatttttgtatttttagtagagacagggttttattatattggccaggctggtctcgaactcctgacctcatgatccgccaggctttggcctcccaaagtgctgatattacaggcgtgaaccactgtgcccggcttattaccattcttttatggatcttgtaatattaaaacatgcatcttatatactgactctccaattaatttccctttgttctgattaatgtgaacaaacaaaataatttgatttgattttgctggtggtggtccccgtcatgatgccatgattcatgaccatcaacaaatgacttaagtgacttatcgttctctgccctatcagaagtagctattctgaggcagtaaggtctcatccacagagcacaagactgcattttaattttcctggtccaagcaccaaattaataaaacacaacagctagtctacttgctgcttcccaccagcatctctgcaatcactaagtgtgcggctcctttaaggcagctcccaggctaggctggagacagatctattgttctcaccctcaggctgcctggagagtcacaaatatttaacaaaggaagttccagacttaggtgacaacatatattatcacaggaagaagtagaaatcatagtaatttgctgtaatcctacagaagcggatataatcttgttctctggactaagagtcaccttacagcagaagctgaaaggccctctgattttctaagaatagaaattgctctaagtaaaatgatggtttattagatccggaagtgatataaaaatggttctaggaaaatgaagtgaactaaaataagaagctacaaatagaggaaggcagaaaaacttggtgataatgtgaggggatacaaacaaaaatttgagaggtagtccaggtttgctgttgctcccaagactgtgcctgcggtggctgcagcatctttgtaattcactgccactatttcgggatgacttgaggatgattgtaaccatgttgtagactaaaccattaaggcagctgggatcaggggctccatattgcttaaaatctttacagcagaggtgtgtgtgtgtgtgtgtgtgtgtgtgtgtgtgtgtgagagagagagagagagagagaatttgaatccaattaatatatatattttgagagagtctggctctgtcatccaggctggagtacagtggcgcgatatcttggttcactgcaacctccaccttccaggttcaagtgattctcctggagaatcccgccactgcactccagcctgggtgacacagtgagattctgtctagaaaaagaaaaaaaaaagacatagattcttggctgggcgtggtggctcatgcctgtaatctcagcactatgggaggccaagacaggaggactgctcgaggccaggatttccagaccaggcctgggcaacatagcaagaccctgtctctaaaagaagaaattagccagacatggtagtgtgtggctagctactcaggaagctgaagcaggaggatcatttgagcccaggagttcagggctacaatgagccatgattgtgccactgcactccagcttggatgacagagtaagactctgtctcaataataattagaaaaaagaagtagattttttttctccatcctttgaatgagaactggtttatgacttgtttgacccataagatgtggtagaaatgatggttcatcagtttcaagactagtgctcatgaggaatttcatacttctcattctctctctaactctataactcatctccaccatgaggacaagtctggaccagctttctggagggtggaagaccattcagagtggaggaatgtggtctcagacaaggcattcaaaatcagtcagtctggctgggctcagtggctcacgcctgtaaacccagcactttgagaggccgaggtgggcagatcacctgaggtcaggagtttgagaccagcccggccaacatggtgaaaccttgtctctcctaaaaaatacaaaaataagttgggcttgatggtgcgtgtctgtagtcccaggaggttgaggcaggagaatcgcttgaacccaggaggcaaaggcagtgagccaagattgcaccactgcactctggcctgggcaacaaagtaagactctgcctcaaaaaaaaaaaaaaaatcagtcagtccccagctgacctaccaactgactcttagatgcataggctcaataagtgcttcttgttttatgccacagtgtttgatatgatttgctatgcagtatcattgtggcaatagataactgttagctaacggttgcagaaattggtaccaggagctgggcactgccctaacaaaatcctcaagtatgtgccagtggccttggcactgcatagtggatgaaaggtagaaaatcacaaaggaaactgttagcaaagctgcagaatagtgagaaaattgttattggaggcagaaaaactggtgacctatgttatgatgtagtgaaacgattgctaaactatcgcccgaggttacttagaagatggaaagtatttctgatgaactgttgtatttggataagggaacctccagacataatgctggctgctcatgtggctgagtatgataatgcataccaagagtggggtgaactataggggttgactgattttctagaagaattcaggggaaatacagggggactatgacttgctaggatggaaaagaaaactttttctcacttccagtctctccacccacaattttttttttttttttagacagagtctcactcgctctgttgcccaggctggtatgcagtggggcaatcatgactcactgaagccttgaactccctgggcttaagtgatcctcccgcctcagcctcccaagtagctgggaccacaggcatgtgccaccatgcacagctaatttttaaaacatgttttgtagagatggggtcttgccgtattgcccaggcttatattgaactcctgggctcaagccatcctcccgccttggcctcccaaagtgctgggattataggcatgagccatcgtgcctagccacaaaagattatcaaggtgaaaaaaagcctgtgaatatggatcaaattaaaggtgtggccttctgaccctttgttatgactgttgaaaatacaaaggtagtgcttggtgaaaagccgaccagtcagacaaaagggtttctaggaagctttaagggcatgctccctcagaaaccagatcttaaaacaggaagaagttggtctagagagagagggtatttcttgaaaacaatagtgatgtggtttctggaggatggagtgaagtataagcagataaatagcaagcttacaaagtttgaaagggaattgtataggcaggactgccagcatagactttaaaattttttattatgtacttttttttttttttttgagacaggttctccctctgtcacccaggctggagtgtagtggcacaatctcagcctcgctgcagcctccgctcttcaggctcaagtgatcctcccacctcagcctcctgagtaactgggactacaggcatgtgccaccatgctcggctatttttttgtatttttaatagagatgaagttttgccatgttgcccaggctggtcttgaactcctgagctcaagcaatccacctgccttggcctcccaaagtgctgtgattataggtgtaagccactgtgcctggcccatttttaaattttaattcttggctgggtgtggtggctcatgcctataatcccagcactttgggaggttgaggcaggcagatcaccggaggtcaggagttcaagaccagcctggccaacatggtgaaaccccgtttttactaaaagtacaaaaattagccgggtgtggtggcacatatctgtaatcccagctactcaggaggctgagacaggagaatcgcttgaacctgggaggcggaggttgaggtgagccaagtttgtaccattgcactccagcctgggcgacagagtgagattttgcctcaaaaagaaaaaaaattaaattcttttagaggcagagtcttgcattgttgttcagactgaacacgaataatcagattgtttgtttccttgctattgagttgtttgagttccttataaactttggatattaacctattatcaaatgtatggtttgcaaatcttttctcccattccataggttgtcttttcacactattgattgattcatttgatgggcaaaagctttttagtttgatgtaatctcacttgtctatttttgcttttgctgcctgtgcttttggggttatatcaaaaaaaaaaaaaatagttcagatcaatgtcaatagcttttatcctaagttttcttctagtagttttacaggcttaggtcttatatttaattgtttaatccattgtgaattgatttttggatgtggtatgagatcagggtccaatttcattcttctacgtgtggactttccattttcccagcaccatttactaaagagattgtcctttccctattgtgtgttcttggcaactttgtcaaagatcaatggactctagatgtatgcatttatttctctcttctgttccatgggtctctgggtctgtttttatggcagtaccatgttgttttgattattctagatcatactgaagactctgactctgagtaggatggtatgactgatggaagatagtcgcaaattcttggacactcttccccttgatgggtggagtttagtctctctcctcttgaatctgggctggccttaggcagtcacttgtgatgaagaaaatgcagtgaaagcaacgctgtgtgacttcagagacgaggccaaaggcactcttgtagctctgagataggaggtgggacctgactccataggcggggcttggacactggaccagactgaagactaggtaaaacagggccgggcaaaagcagcttttaagcagacacacccatcagtgtaccatgtcaatttactgttgccatgacaacacccaggcgttaccacccctttccatagcaatgactcaatgattactaccccttccctagaaatttctgcataaaccgtcccttactctgcatgcaattaaaagtgcgtataaataggactgcaaacggcctgagcagctactctctagccctaccttgcaggagcagtcaccgagctgtaacatcgcctcttcaataaagctgttttcttctatctctggcttgcccttgaattctttcctgggcaaagccaagaacccagcgggctaagcaccactttggggctcctggccctgcatcagcttctgccttgctctcttctgccttgcctgctcttcagaccttctctcttgggttgcttcttctaggaacccggccctgtgaaaagcccaagccacagggaaggccacatcatgcgctcttacttttcttccaccttattggccactctcaccatcattgctgcatttattccagcactactctatgtcaaaaagctttacacacataaggtcatctaatcttcatctaatgatctctgttccacctataatcccttcttatatactttgtattgattttgcagaacatggaagcatatctctaatggacttcaagctctaaaggacatgaaattgtctccatccttcttctcttccccttgcttggtagcagttgaaggacacccaggatctcagctcaggggaaaacagaaggtcatactggagtctgagaacccttagtataaactctctaactcctggaaacactgttaagaattattgaaagcgtggaaataaggctggtctggaactcctgacttcaggtgattcgcctgccttggcctcctaaagtgctaggattacaggcgtgaaccactgcgcctctctggaatttgaccgtttatgctaaggcatgttgaggcagattttagcctcaggtcttccaggccaatggacccctcgcttctaaaagagttccagcgttgggttctgatcatgtcccagttttttgtttttttttttttaatagagacagggtcttgctatgttgttcaggctggtctcaaactcctggctcaagcgatctcccgcctcagcctctcaaagtgctgggattactggtatgagccactgtactcagtttatgtcccagtcttattggttcctgggggaggaaattgttggttccaggtgtagttagaggtcaaaacgttttctattttgcatgctcaggctacatgacttgcaattttggttctgttaaacctacaaggtaactttattattattattttttgagatggagtttcactcttgttgcccaggctggagtgcagtggtgcgatctcggctcactgcaacctccacctcctgggttccagcgattctcctgcctagccttccgagtagctgggattacaggcatgcgccaccacgcccaactaattttgtatttttagtagagtcaggggtttctccacattggtcaggctggtctcgaactcccaaacgcaggtgatctgcccgccgcagcctcccaaagtgctgggattacaggcgtgagccactgtgctcggccaacattttgttatcaacagaataggcccagtttgggctggtcccacagctacagcatcctttattcagtttatatatcctcaatttctcaaattttctttgagccagttttaccatcttgccagctccctgataaatgagttaaataagtctctgaaccatgggtcacattgtatttacatgagaattttttttaatttttaattttttttttgagacagagtctcactctgtcacccaggctggagtacagtggcatgatctcagctcactgcaacctctgcctcctgggttcaagtgattctcctgcctcagcttccccagtagctcatagctcaacctcctaaatagctgggattacagggatgtgccaacacccctggctaatttgtgtatttttagtagagatgggggtttcaccatgttggccaggctggtctcgaactcctgacctcaagtgatccacctgcctcagcctcccaaagcactgggagtataggtgtgagccactgtgcctggccagccttatacatgctaaagaacattacctgcttattatttctttatttgaagataaaatcaacttaggccaattcatcatttttttttcttttttgaccctgagtctcgctctgtcacccaggctgtagtgcagtggcactatctcggctcactacagcctctgcctctcaggttcaagtgattctcttgcctcagcctcctgagtagctaggattacaggccccagccaccttgcccggctaatttttgtattttcagtagagacggggtttcgccatgttggccaggccggtcttaaactcctgacctcaggtgatccgcctgccttggtctctcaaaagtgctgggattacaggcatgtgccactgcgtctggctcatcttttcttttagtgaaagaaataaaatgcaagaacagaacttatcctaaagttaaatcatcctagttcacaaaaggagcctgaaaatgatagaagcataaggtataggagaagtcctttcccctaagtcactgctgcaaacagatcctggaaataaatatttgcacataaacctctaagtagaggccatgatcagaacccaacactggaactcttttagaagcgatgggtccattggcctggaagacctttccctgcagtttgaagaggaataaataccacctcaaataaggtgatttgaaaaggtgttaaacaggcagggcgcaggggctcatgcctgtaattctggcactttgggaggctgaggcaggagactctttgaagccaggaatttgagacccacctgggctacacagccagactctgtttctacaaaaacacacaaaaattagccaggcatggtggtgcacacctgtgtggtctcagctactacataaggatgacaaataaaaggaataagttggctgggtacggtggctcacacctgtaattccagcactttgagaggctgaggtggcagattgcttgaacccaggagtctgagactggcttgggcaagatagcaagaccttgtccttattatttaaaaaaataaataaaaaagaaaagaattacctatggtatttttttttaattagaaaggcagccaacttccagaagaaaaataataaaataaaataaaataaaataaaagccaattaaatcccttgtaggggccaagggctttggtcctctcaaggttgctgacaaatcaatttgcaaagggcagattaattggagaaaaggcatacaaatttatttaacatgtatacacaagcactttcagattgaagactcaaagatacaggaaaaatggttcatttttacgcttaggtttgaaaccacttttgcatgaatgataacagtgagaaaattataacagtggaagagatctgatctaaccaatgcccatcttgcgattgtttttcttttggttttgttttcgagatgatgtcttgctgtctcctggtctggagtgcaaaggcacaatcatggctcactgcagcctcaatctggcgacactcccacctgagcctaccaagtagccaggactacaagtgggtgccaccatgcccggctaattaattttttttttttagtagagataatcttgatatgtttcccaggctgtttttgaactcttggcctttggcaatcctcccccagtctgcagtctgcctgctttggcctttaaggtgctagaattacaagtgtgagccactgtgctcggcctcctctccttttttgtggctatcttgacactgagtttttgcgtagtccaggccagttgttttgtataacatcccatacttctgggattgtctgattgttttttctttttttttttttgagacggagttttgctcttgttgcccaagctggagtgcaatggcatgatctcgctcactgcaacctccacctcccagcttcaagcgattctcctgcctcagcctcccgagtagctgggattacaggcatgcaccaccatgcctagctaattttttgtatttttagtagagacggggtttctccatgttggtcaggctggtctcaaactggcgacctcaggtgatccgcccgcttcagccttccaaagtgttgggattacaggcgtaagccacggcgcctggcgtctgattgcttccttatgattaaactgtcctttcccctaagtcactgctgcaaacaatttctggaaataaacatttgcacataaacctctaagtagaggccaggactcagccaggcgcagtggctcacgcctgtaatcccagcagtttgggaggccaaggcaggtggatcacttgaagtcaggagtttgagatcagtctggccaacatggtgaaaccctatctctattaaaagtagaaaaaaaaattagctgggcgtggtggcacatgcctgtaatcccaactactccggaggctgaggcaggagaattgcttgaacccgggaggcggaggttgcagtgagccaagaccgggccactgcactccagcctgggtggcagagtgagattccacctgtcaaaaaaaaaaaaaaaaaaaaaaaagaggccaggactcagagcatcctggtaacggttgtgcagaatccacactccagctgggaacactggggaaagtggagcccaccgttttctctctccttactgtcgggtcaggcttctgcccactagagggcagccaagtcaaaatcttgatagaaacaagttctaaagacttacccagatttgctatctcttctgagatagtgttttttttttctttttttttcctcttttttttttgaaataaggcctggctctgtcgctcaggctggagtgcagtggcacgatctcggctcacggcaacctttgcctcctgggctcaagctatccccctgcctcagcctcacgaatagctaggattacaaatgcatgccaccatgcccggctaatttttgtagagacggggtttcaccatgttgtccaggctggtcttgaactcctgggctcaagagatccacctgccttggcccccgaaagtgttgggattacaggcgtgagccatcaggggcggccttctgagattgttaatgtgaaaaattctatcgaagttgtctatcaaagttgtcatccaccatttgtctcttatgagtgttcttttttttgagatggagtcttgctctgtcgcccaggctggagtgcaatggtgcgatctcggctcactacaacctccacctcccaggttcaagcgattttcctgcctcagcctcacaagtagctgggattacaggctctcgccaccatgctggctaatttttgtattttcagtagaggtgggtttcactatcttggtcaagctggtctcgaactcctgacctcaggtgatccgcccacctttggcctcccaaagtgctgggattacaggtgtgagccaccgtgcctggcccttttgagtgttcttttgggaccctgtcagagcaacttactaagtacttcctctattgttaacttgttgagttgatgtctcctctgaaattttgtgtatattttgaggagatggactatttctagaggtctctccagaactgaaactgtggtttcctgtaagtctacgaatactgacttctcttttttttccctttgagacaaggtcttgttctgtcacccaggctggtgcaatcatgtctcactgcagcttcgacctcctgggctccactgatcctcctacctccgcctcctgagtagttgggacaataggcatatgccaccatgcctggctaattttttttgtttttggtatattttgtagagatggggttttgccatgttgcccaggttctgacttttaataaataagaaatttggtctctgtatctttcttttcccctttatacttcactgaagaaaatgaaggtgggcttcttcatggggctgggccagtaaaattaggctacactcatataagcatttccccaaatcctcctaatacctcttgtgaaaaagggtatctgccacataataccatcaattctgtgacaaattattctaacccgctggttctccatcctgtctgcacattgaaatcacaggggaatgacatctactgatgcccctgtctctctctcagagattctgagtggggagggaatttgtgttggtgtaagtgtgtgccccacaagggaaggacctgcccaacacaccgtgtgctttgccctcagcaaggagccacagctgcaggtggatttccacaccgggatggatgaggactcagacatcgctttccatttccgagtgcactttggtcattgtgtggccatgaacagccatgagtggggggtctggaagtgtgaggtgaaatctgacaatatgccctttgagggtggccaatcatttgacctgcgcatctgagtgctggacaaggaggaccaggtgagcaccccaggagctcccagcatgcagcctctgtggactcccagagcaggaggtagctctccctgccctggccccaccagtccctcgggacccatctcccataacgactcctgccccaggcttttcatcacagagcaccctctgcttgcactgccaccctcagctctttcccaaatctgaccaaggtcaaggttggttcacttgccatttcccccaaggtggagaatcatttccatagctgtcatttctgctcatgctgttatttacattttcatgtggccaaatagacaaaatacatgtatgaatcaaattattttagtcagtcaaaaattaactcttcctttcactcccgaacctcactcctactccccagaacaacactaccagcttctctgctctccttccagagataatctaccattagagaaccgtatatttcctcttcctcatttgtataatatgctttcattcctttttgtatatatgcctatacacatattcatatatacatatatgcatatatgctttcatttctttttaaacaaatgctgttataaatgtctttgtacattacactttggaaactagagtcgatttatagtcaaagaacatatcttggagaattcatctatctatggtgctgcttcatttttcttttttttttttttgagatggagtttcgctcttgttgctcaggctggagtgcaatggcgcaatctcagctcactgcaacctccacctcacaggtccaagcgattctcctgcctcagcctcccaagtagctgggattaaagagatgcaccaccacgcctggttaattttttgtatttttagtatagatggggtttctccatgttggtctggctggtctcgaactcctgaccttaggtaatctgcccgccttggcctcccaaagtgctggcattacaggcatgagccactgcgcttggcctgctgcttcattttttaaagattgcataatatgccagtagaaggatgatccaaaatgattgaacttgaccgttttgatggttactgcgtggtttttagtattttgctctcacaaagggtgctgtattaagctttctaatcaactcttttgtaattatcaacctaccaatacttacattggaggatacttgcaaagacataaaataattggttgaaaattgtgtgaaaaatcttaaaatttcataaattaatacctttaagatgactttcttcatagctacagcaatacagattatattgaaattttctcaccttctctaacgggtaggccaaaaggtgaacattttattcagctctaagtgaggcatctgttcatatgcctactataggctgctaaaataatatcctatgttttgcaacatctgtcctgttcctcctctctaagaacacttgggtttcattcttggccacctccagcccagatctgggctactccaaagagaaactgggccatcagcagtgaatgggagtcacagttggtggaacttaaaagtacccattcaataaacattgtcaagcactaacctcgtggcaggccctgtgcaagatgcaggaattcaaggtcaagagacacaatccctggccatggggatcttccaggctagaggggagatccagcaaacagggaccacgtgacatagaggggtagagcctcactggaagaatgagaggaaacattgaaaatgcagtgagcaactgtctcagatagccacaaaatgtagtctgtaaacagaagtgagtctgccgggttttgatgtataattaggagttttctgggtgggtgttgtaggtactagggcagagtagagaggaggctgaaagcttgtttggtgaaatactgtctttctgatgcacttttcctcttgcaggtaatggtaagtggccaacactgctacagctttgcccatcgactcctgccagggtctgtgaagatggtgcaagtgtggagaggtatccccctgacctcaatgtgtgtctgagattgaggtgatgaccacactccccactgtcgaggaatctctctttctacgtgaccatgcggttcccagagcctgctgacagcatgatccctccttactccttcccctacacttgctcattaaaacttcaccaaacttcacaggattttggcttttgcttgaaggggaaaaagcaaaagtggtcatcaccaagagggcctgaggggtttcatgggaggcatcaagaaatcaaagagaataaagcttcctgtggcacaaggagtgagtgacaaggtccctggaatgtctgacatgacattaggaacaacgtccatctatagcatgtagttgacttcagagactctgacccaaaatcctctgatttgggtcaaacccaaatcagagatttatctgacccattaatcctccttccttcttgccctttctccttctgccatgggatgatgtggcacaaaggccctggccagatcccagctctgtgctcatggattttccagcctccagaattgtaagccaaataaatgtttgtttgttataaatcatccagtttgttatagcagcacaatatggacttagatggtggtgaagcactgttgcaggcctggaggacagaaatcactggtatagggagaaattctacaagttgacccagaccctaccaggggcttacctccagcccagtgcctgaatatgctgaggcaagtgaaccaggaggaactgagaacagaatccaggcttcactggctgcctctgtgttggtgacagcagaaagacgagtatagggtggtggctgtgagatggcattgtgccatgggaagaagtagaccaagaagtgtttcctgggcactgaggagtgtcttctatctcatggtggcctctttaccagcacagctgaccagtgcatgggtccctctacctctcaagatacaggcacagtgataagaaatagtgcccatgtaggtcctggagaaaaaaaaagtcaaacccaagatatgtaacctccagaaatgactttggaagtgcctttatttatttatttattttcagatggagttttggtcttgttgcccaggctggagtgcaatggtgcgatctcacctaaccgcaacctccacctcccggattcaagcaactctcctgcctcagcctcctaagtagctgggattacaggcatgcaccaccacacctggctaattttgtatttttagtagagacagggtttctccatgttggccaggctggtcttgaactcccgacctcaggtgatccgcccacctcggcctcccaaagtgctgggattatagacgtgagccaccacgcctggcctagaagtgcctattttattgtgtccaacacttgacccctttacaaagctattataacagtgtggtgcttgcttaaggagaggcacatataccaatggaatataatagggagcccagaaataaacactcacatacacattcatgtgagagtccacagtaggccaagaccatctcactgggaaaggacagtcttttcaacacatgatgctgggaaaactggacttacacatgcaaaataatatggttggggcctttatcttataacatatacaaaaattaactcagaatgtatcacagaatacatgtaagacctacaacgataaaattctttgaaaaaaacatagacgcatatcttcatgacatgaaatttggcaatgatttcttggggatgactccaaaagcacaagtaacaaaggaaaaaacagataaactggactccctcaaaactgaaaacttcatcaaaggccattctggaaaaagtaaacagtcaactcacagaatggaagataatttgcagatcagatatctgataagagattattatctagaatagagaccttctacaatccaacaacaatggcacaaatactctcccgatttaacagtgaccaaataacttcaacagacatgtctccagaacagatataaaagtggccaataagcacatgaaaatatactcaacttcagagtcattagggaaatgcagaatcaaagccatagtgagatagcacttcactctccctaggatggctgttattttaagatgcaaaatcacaagtgttgtgaggatgtagagatactgtaacccttgaatgttgctgttgggagtgtaaaatggtgcagctgctgtggaaaactatatggcagttcctcaaaaaggtcaccatgtgatccagcaacagcacttctgagtatacaccctaaagaattgaagaaagagactcacgctgatatttgcacagcaatgttcatagcagcatgattcacaacaggcaagagatggaaacaaccccaatttccatctacagatatacgtacgatggaagattattagccttaaaagtggatgacattttgacgcttgctatcacgtgaatgagtctttaaaacatgctaagtgaaataagccagactccccctgaggctgtaggtgcaggctgtggggagaaggtaacggggcaggagtaggggctatggacatttggacccttcctcctgcagctttcttgtgccttcaggacctgtgtaagcctgatctctctgcccagtgagtccccacttccatcctgaggctatttggtcagtgtcaggttgcaaaagacacacaaccatgaaatgtgacttgacagatactctgcagtactttcactttcagatagctctggctgaacttgcaacctaaatacaaataggattttgtttccttttcactgctagttatgattttcaagaaatccatggtttagaggaaaatgattttgtaatttgtgctgaattctgatgcatgctatcttgtcagtatttcagatgaaagtgatagaaaagacacttgtttattgagggagcagttagcaagccactcagagtagatacacaatggcctgccctaagtgaactggtgggaaataagagttgcttgatcgttgattttttatgaaagtagagcctaggactttccgtaggtgtgagaaagtgtgtgatggaaagaggaggatcagggatggtgtggaggtttctgacctgagagaggggacttggggacttcagtccccacatccatcttgaggttattcactcagtgtcaggttgcatagaacacacaaccgtgaaaggtgacgtgacaggtgctctgcagcactttcacttttagatagttctggctgaacttgtgatctcactaaagatagaaatagattttcaagaaatccatggtacagaggaaaataattttgtaatttattgctggattctgatgcatactatctcattagtatttcagacagaagtgataggaaggacacttactgaggaagcagttagcaagacactcagagtagacacacaatggcctgccctaggtgaactggcaggaaatcagagtcactctatccgtggttggcttacgaaagtagaaccataggactttccacaggtgtgagaaagcgtgtgagggaaagaggaggataatggacggcatggaggtttctggactgagagaggggatttggggcatgaataactgagagagtagcagggtgggaggggctgtgtcggagctgagcagggctgagtgggagtcatggtctatactgaaagcagagtagggatctcatggggactctcttccttctacctggaccccaaaactcacaggtccctccactcaaccaggaaaaagaagagggaagctcatatgctcttcgccctcagttcaggaatggggggtgaaccatttcatttctggaaatgctgagacccagatttagcaaagaccaatttcctcatttaaagggtgcacccacatgaccatgccctcctcctatcctccttcctgacttaatgggagaagtcgtgtcacagaggaggggctgaagcctcaaataatggacagggcagtcagtacttttcagagcgtaagtcttggtcagagataaatagaaggcaaaccctttgatcaggatacacaatgacatggcttcatgacaggcatgccaaatacatttctgtttgtgataaatcatggagtctgttatagcagcacaacgtagactgaggtggaagtgaagtccaggaagctgggctgcacagctcctcatcctcattccatcatttccatctgtgcattttcctggtgattccctgcccctggcacattcctcactgtcatttctgctgcatcacagtcacaggcctgcaaacagaaactgagtctcttcctgtcaccccctgctcacactgctgggaaatcttgctaggaagggcttggaaacaggaataaggctgggtgtggtggctcacacctgtaatcccagcactttggtaggccaaggcaggtggatcacgaggtcaagagatcgagacaatcctagccaacatggtgaaaccccgtctctactaaaaatacaaaaattagctgggcctgctggcatgtgcctgtagtgccagctactcgggatgctgaggcaggagatgaacctgggaggagcggaggctacagtgagccgagatcgggccactgcactccagcctggtgacagagagagactccatctcaaaaacaaacaaacaaacaaagaaaaaaaaaacaggaataaagccagaggtcaggaccaacagggaccatgtaagtgctgcaactcagacattcacatagaagaccggacactattccgaagagctgtccagtgggagaaaacaatgtcaccgctatgtgtaagttgaaaggcacggccttcaataacctcaagtcacataaaccgagaaagaagcatagacgattttatgagatgaaaacatgatcacattggatgaaatattctgtaagtatctattaaatccatttcttctatagtagggattaacgttctttgtttgtattgtctggaagacctgtccaatgctgaaaatgaaacatagaaatctccagctattattgtattggggcctatctctctctttagttctaataatatttcctttatatacctgggtgctccactctttggtgcacatatatttaaaactgttatatcttcttgctgagttgatgtcttattcattatatattgactttattgtctctgcttagagtttttgtctcaaaatatattttgtccaatataaatatagctacacctgttttgtttcatttctattagcatggaacatctttttctatttctttatcttcggtatatgtgtgcctttataggtgaagtgtgtttcatgtaggcaacagatcaattgtttttgttttttcatccattcagccactctatgtgttttgattggagagtctagtccattttcattcaatgttttcattgataattaagtaaagacttagtcctgccattttggtgtttgatttctagctgtattttggtcttctcttcctttgtttcttactatctttccttactgaagataattttgtctggcgatacaatttagtttcttgctttttatggtttgtgtttttttttgtgaatccattgtatgttttctggttcaaggtgaccatgaggcttgcaaatactattttataacccattattttaacatgatagctacttaacaccctttacttaaaaaaaacaagcaacaagaaaacttatagaaactctatactttaacttcatccccccgccttttaacttttagttatttctgcctatatcttattttactgtgtatatcttcaaaagttgcagttattattattattattggttcattgtttagtctttctatttaggaaatgagtagtttacacatcacggttacagtgttataatattgtgtgtgtttccactaaaaaatctgctgccaggtgtattgcagctgcattgtatgctattttttttctttggggcttgcaggattttttctttgctcttgacctttgaaagtttgattattaagtagcttgaattagtcttctttgggttaaattgtcttggtgttctataacctgcttgtacttggatattgatctccttttccaggtttgggaagttctctgttattattcttttaaataaactttctaccactatttctttctctactttttctttaaggccagtaactcttaggtttgcctttttgaagctatttttctagatcctatagccatgtttcatggcttcattgttttttactccttcttcttttgtctcctctggctgtgtgtttcaaatagcctgtcttcaagctcactaatattttcttctgcttgatcaattctgctgttaaaagactgatgcattattcagtatgccaattgcatttttgtattttattttgctttatgttctgggatacatgtgcagaacatgcaggtttgtttcataggtaaacatgtgccattgtggtttgttgcacctatgaacctgtcacctatgtattaagctccacatgtattagctgtttgtcttgatgctctccctctctttgcccccaccaacaggccccagtgtgtattgtttccctctccgtgtctgtgtgttctaactgttcagctcccatttatgagtgagaacgtgcagtgtttggttttctgttcctatgttagtttgctgaggatgatggctttgagcttcatccatgtccctgcaaagggcacgatatcattcctttttatggctccatttctcagctccagaactattgtttgagtccttttaattattttaaacttttcggttaacttatctaataaaattctgaattccttctctgtgttatcttgaatttatttgagttttcttaacactgctaaattaaatttcctgtctgaaaggtctctgcttctccctggtgcttatttagtttatttggggagatcatgctttcctggatagtgttgacactagcagatgttcttcagtgtctgatcattgagtaattaggtatttagagtggtcttcactgtctaggcttatttgtacctgtcctttttttgaaggcataccagatattccaaacacttgaatgttttgatttaagctgtatctcctttggggtgaactaaaaaccagtaatgttgtgattcttgcagactcatacagttaccaccttgatgatcttggacaagttccaggataattctctggattacaatgcggagacttttgcccttttccctttctttctccccccaaaaaaacagtgtgtgtgtgtgtgtgtgtgtgtgtgtgtgtgtgtgtgttttgagacacctaaagctggggatagactaataaaagcaccgttgtggtcaccaccactatgactgggtcagacctgaatccagtatagcactggatctcactgaaggccttctgtatccactccctggttgcaacctaagttcactcaaggccctgggactctggaagcagcagatggcagagcaagccaggtctgtgtgcattccttcagggcggtgagttcccctaggccttgggtgggtccagaggtgccacctgaaagttggggactaaagtcaaaaaccttagaagtctgtatggtgcttttattttactgcagcagagctggcactcaaaccacaagatgcagttcttcccacactcctctttccaaaggcagtggtcaccccataaccattgccacaatgaagagtatggccagactaccacagatgtttccttaaggcccacagtctcttaagtcaactcatagtgaatgctgccaggcccaggactcattccacagggcaatgaactccgtctggcccaaagcaggtaaatagatgtcatccaagaaccaagtccctgaattaggggtcccaagagcctgcttggtgctctactcccttgtggccatgcaggtacctaaggtgcaagatgaagtcccttttgcttttttctctgcttttaccaagcagaaagagtttttcctcatagccaccacaactggtaatgtgctgtgtcccatctgaagccagcagatcttagaagctcatccaagaccctcagcatagtacctgggtattgctgataccattagcaggtgataactctcctctcctcaagtgaaaggaaggggtctcttttagagccacagactgtgcatcctggagttaagtgaggggtaaagccagcactccattagtcaccaaagctgctgtctcagtaagtcacctgaccccctcttcaccagtccattgtctctgggcccagttcaaccccatgactcacctaagaatttctggccttatggcctagactgccttttaagcttacttgaaaaaccagagtaccgtagctctcactggcaaggtttgcaggaactcaagtttcaaccgctgggatcagggattttcctctggctaagcctggcttaaatgctccctccattggtgtgtgtcagctgagtttgatccaatttgcctttcttctgtaacaggacagcaatgacttcaatacctcacaattgctgtgctctcctccctccagtaccccagtacccagagactctgtaccacattcctgctgcctggatgaaggactggcattggcaattcaagacgtttttttctatctcttcagtgatatagagttaaaaccaggtatctatgaggattcacctgcttttggtttttatgaaggtgtttttcttgtgtagatacttgttaaatttatgtccttgaggcgtgggggtaagattggtggagcactctattgtgccatgttgcaaggtctccccaatttaaattttgatgaaatccagtttatctgttttttcttttgtttcttgtgcttttggaatcatatccaagaaatcgttttaagatcctatgtcatgaaatattcttcgatgttttttctaaaaatattaaaattctaggtcttacatttattgtttgatacattttgagttaattcttgtatgtggcttatggtaaggtcccaactacatcctcatgcatgtgtatatccagtttccccaaaatcactggttgaaatgagggtcctttcccaaaagggtgtcctggcacatttattgaatctcaactgaccacctatgtgcatgtttactttttggctatcctttatatttgattgatttctaagtctgtccttaagccagcaccacattgttttgattactgtagttttaaagtggttatatttgggacacaataaaacaggcactggcaaagtcacttttaggctttacacatcttggatttgtctttgttattttttcaggagtcatataaatactattcctcatcattatgcctatatcttgagaagtaaagacacatgccctaatcagctgtgctggggaataggtcaccatgagatagaagacacttctcagtgtccaggaaacacttcttggtctctttcttcccatggcatgactcccatctcaactcacaccccccatactacactttttgttgtcaccaacacagagtcattgagtgaagcttagattctgttttcagttccctctagttcactagcctcaaaacattcaatgctgagcagaaggtgagtgcctgttgtaggctggaccaccttgcaaaaatgctgcttataaaaataatttctgtcttcctggcccgagtcagtccttcacttccatctatgtgcagcctgttttgctgctggaaccgactgactaatttataacaaatagtaatttatttggcacaattctggaggctggaatatccaggaacatactgttggcatctgtccagggcctttgttttgcatcatctcatagtagaaggaggaatgacaaggagtgagatcaagagagcaagatagggccaaacttgcttttataataaacttactctcacaataactaacccaattcagtaaaaatgacattgatctaataatgcagagcccttatgacataatcacctcttattacaccccacctcaaaacacgtggattggatattacatttttaacacatgaactttgcggcacagattcagactatagcagccacaaagggagatgaaggaaatatcacaaaaatccagaagaaacgatgtcttctcacttcctccagctataactgggcacatttgctcacacaatcatttctgtattctcttcacacacacatatgttgaacatcctctctgtgcctggtcccatgaagttgacaccccccaactccctcatcaatgtttctctccacactgaatagaaattcacattgaattttcatgagtgatagacacttagtattcactctttattccatttaacagttagcttatgttgtcaaaagatgattaacgcactttcctcttttttgagcttcccaagactcaaagatgtcttcagaacaaagtgtaaatcttttacattggcatccaggtttttctaatagaaacctagcctctaggatacttccaagaacttcttaactcattctgtgctccctaaaaataacctattaatgtggcagcaaaagcatgttgtggcatatctcttttgtttttgatactgtttgccacttttgtttaattcttacctcctctccatatagatagaacatacaagtattttaatattcagaataatttccacctcttattgaattacacccaaggttatgttgtgtctatttagggggaaataataagattttaataattattttgtgacccatatatggactactaacaaaaattgagtttttctcctatcttaaactctgtagcattaaaactcatgctagcaaaatgaataataaattttggtctgaaaatccaaagtgaattctggctgcatctgttatagagatttggagctataattcatcaaaaacgaaacaacacctctttcttactctgtcttcttggcccctcacttgcaaatagatgcaccgatgttcagcaccatgaacagtgccaccgaggtttatttttaaaaaccactttaggggacttgggcatcaaggttaaaagtgtcacagagtagatttatttttggggggtcttcagcaataactggaaagatttaaagaccttttagaaaggaaggctttagagttcagaaatgactttttgttttttgagcaaagccctatttgctgggagaacatcaggaattttgattgaggaggggagagaaagttttggagtgggtcaccagagccaattcaaataccgtttgttgaacactggttcctgaactctatgttgtctctttgtatctgaggcatgattcctgcccactatgagcacagagtagtatctgagataaagatgagcgtaaccaatggacaaagcactcaactgagctgatgaatatcattcaagaaagggcagtcaccgtgtgcttgtatagaaaagccaacacgtaggactgtgtaggttattcaaatgcaatagccaccagccaaggggcaagtcgatatgaaatcaaaggcattttctgctcagcaagccatgggtcccaggataattttaatctactcagagcaagaattgcttaattccagaagaaattaattccatgctagtgaaggggcctatgatccattatcaaaatataaaagttacctagactgagaaagggaaggtgtacaaagaagagtgtacctattgaaaacccaagagattccagtgagagaggagggaattttattccatacaggaatggaatgagggagaaaggtgtgcagagcatgattagctgtgcattggcacctcaaggtatctggatgttaggttaaagatgagtaaggagagaatcatacccatgagtagggttgaagttgaaagagctattgcaatgaacatggggagagaggatgtggaggatcaaaatgatgcctgagatgagcccggtggaagagaggccatttggtggaaccctcaccaatttgaattcactagtttttaggcaatacgttgtttctcctaagtggttctccagatgttcagtgaagcagataatcatagctcttgtagagggaataggactgtgattctgccatcttggtgggaattctgagaagttgagaatggagggtggagccaattgctgcagacaaacattcccagaagaaaagaatttaggcatctggctggtttcagcaatgacataaaccagtgactactgtctattttctgttgacactataaaataaatatgttcattgcatttttcctatgttcgtttcagtattgtgtgtttgatttgtatagggcagataatttattcctttagtgaacatgttgtgagaaagtgcacctgataatttgtactcacctcaggaacaccaggtcctgagttagataataaaacaataaacttcactctgagtctgttcctctattgcattggtttctgggattatttagaaggtaagtgttttggggatgtgggaagtgtatgagccagtgggggctaagtggaactcattttcaaaaatgtcccatgataatgacaagtcaaaataaccacagcttgtgtagttccctccccttagtttgggctttctgtgtgacagtttgatcaatataatgccatagaagtcacactgtctgcctttcaaagctaaggcctatgatgcctcgcaccttcttcatgagacttttggaaggcttttttttggtggaagccaatcattgatcatgagttgaggaaattcaaggcactaatgtggagatgagttaggaaaggaaataaacaaccagcccccaggtgttcagccacactagtgttgagttggacatgagtgaagcatcttctgaaatctctgactgtagatctttctgaaatcgagacacccaccacataatctgtcacctacctgagtccactaaacctacaaagctgggagaaatcagaataaatgatctaagccaacaggtgttgggaggttgcctgtgccgcaataccaacagtaacagcagcaaagcagaatctgtttactgtgttcatgtgcatgaattgtgtccattccaccaataaaccacttattttgtgatataaaacaatgaccatttgtttacaaagagaaatctcaggattctgcccacataaaatggaaaaatctgaaaattctttcgggaaaaaaaggattctttaaagggaatcattgaacggtgattctatcgcttggattgaaaacttcagatgtaaacatttcaactttttctttcagtgtcttcagtgcatctcacacaaatctaggcagtttcaagacacaagaaacactcttaggatgagtgaagaattaagatatttcacctagctttcctcaaattacaaagtctctccccaaagccaattatgcctgtatgtttgtaaacaggtacctaacatttcactgcaatcagtcatctaaaatgaaagaattttggttcagagtgtgtgacgtaaagtacgggctgtagaggatgttgtttgttttgtcatctcagacattccagtggtcttgtgactcactgcctgtttcacttgtgtccttgtgccactttgtctttttccccattaaagtaagaaccagatcctggataatttagtgaagttttaatgaccaagtgtagaggaaggtgtgaggagagatcgttctgttagcaggctctgggataccacagtcatggagaaatggggagtttctgttgctccttaacagcagggagtgtggacatcaccctaaatcacagacacacagtgaggtcaggaagacatcccaccacacttgcaccatcttcacgtaacatagtgggagttgataggcaaagctgtaacactgtttgccatttaccattacctgcaagaggaaaaatgcatcagaaatacagcatgccacaaaacaagctatcagccatagtgcctatagtaaccaaccagaaaactcccaattatacatcagaaaccagtagacatacttctatctacagactacctttgtgcctatttcagacattcattcattttatttccaatgtttcctctcattagtccggaagttccgccactctgtgtcacacagttcctgtttcctcagcctcttctctagcctggaatatgccatactctgtgtcatgaacttgaatccttgcatcttctacaggggttcacacagggttagtgatcaacaatgttcattgaatgtatagttttcagttatacagactgtgactgccattcaccactgatggcctactttctctttggagttgcccagggctgccaagcaggtagcaaggaatgaaatccaagtgtttttagagaaaaagaacagaataggtattgcaaaacataatatattattttgaacaactgataggcatatgaaatctgaacaaaatgttaacctttggctttacccatttgaaaagatcaggaaggttggaaatattatttattactaaagctataaaacagtcaattttcagatgttaatttataatatttaaaatgcatacaattttgagccagttatttcatttctttgtaattattctttaatacaactactgggaatttgatttaaaaaagttgattagaaagcttaatacagcatcatttgtgagagcaaaatactggaaacagcctaaatgtccatcaaaagagtcaaattcaataatttttgataaccattctacaggaatattatgcagtgtttaaaaactgaggcagcaccatgaatagatgactttgcaaaatacagtgtttgacaaccagtccagtccaattcctaaagtacatttgttcagaaagaaaagaaaacatagatctgtatatttctgtaaacagattatctccataatttgagtagagaagccagtaatattattgtactggggaataaaattggggctcaatactgagggaaagactaaattttgggctcactgaaactattttatttacatgcagattttctccattttggataaatgaaaatatataagtaacatcatcactagaaatgagcactatgggaaaaaacagaggagattcttcacgttgggggaaatgacaggtgagatgaccttgatcctggtcaaatttgggaaaatagctgaagatggcagtgcaagcagagggtgctctgtgatgaaaagtctggagcaggagcagttatgggagatgggccccaagggactcttggggccagcttacagagagctgcctcctgctctgggagccgagagaggtcaaacactgaaagcccctgggatactcacctggtactcattgtccagctctgagatgtgcaggtcaaattgtttgccatccttaaagggcataccttcagattttccttaatgcttccaggctccacacacatgctgttcatgaccacccaattgccaaagtacactccaaagtggaaggcaatgtctgacttcttatctatcccggtgtggaaatcaacctgcagctgtgggtccttgctgaggtcaaagcacacagcatgttggacaggtcccttctgtatagggcacacacaggacacacacacaaatctcttcccacctttcccaggacagacagaagccttcccggtgacactgcaggcctcatccctgcaggactgcttcagcttcttgttccctcatgcagggatatgctctgcccctcatccccagatggaaactgagccacagtcactgacctgaggctatgagttgtctattctctgagaactctatactccttgatagaagtgtcagtggcagatagagatcctcttggaaactttggcaggtccctataggtgagtcatagcacagatccggaaaatgtggagcaaagacatgccatcctttgtggataacctctctccatttgagaaaaagcatttgccttgctactgggccttaatagagagtgaatacttaaccatggcctccaattttctgtgaatcctggcttctgtcaagaatcaggtatgacccaccatatttgttccagcaaaagacacgatctcattatttttatagctgcatagtattccatggtgtatatgtaccacatttttctttctccagtctaccgctgatggtcatttatattgataccatgtctttgctattgtgaatcatacatgtgcaacaaacatacacgtgcatgtgtctttatggtggaacaatttatattcctttgggtgtatatacctagtaacgggattgctaggtcaattggtagttctgtttttaggtctttgaggaattgtcacactgtgttccacaatgattgaactaatttacactcccaccatagtgaatacgcattcctttttctctgcaacattgccagcatctattactttttgatattttaataatagccattctgactgatatgtgatggtatctcactgctgttttgatttgcattccctaataatcagaaatgttgagcttttccacatacgcttgttggccacatgtgtatcttcttttgggaagtgtctgttcatatctcttgcccactttttaatgaaattgtttgtttttttcttgtatattccttaagttccttatagatgctgaatgttagccttttgtctgatgtgtagtttgcaaaaatgttctcccattctgtaggttgcctgtttaccctgttgatagttttcctttgctgtgcagaagctctttagtttaattagatcccattcgtcagtttttgcttttggtgcaatagcttgcaccatctgcatcatgagttctttccccattcctatatccagaatggcattgcctaggttgtcttctagggttttatagttttgggtaatacgtttcagtttcagtctctgatccatcttaagttgatttttgtgaatggtgtaaggaaggggtccagtttcaatcttctgcatatgctagacagttattgcagaaccattcattgaatagggagtcgtttccccattacctgtttttgtcagctttgtggaagatcagatggttccaggtttgtggccttctttgtggtctctctgttccatatgtgtttgtttttctacaaatactatgctgttttggttaccgtagcctcatagtatagtttgaagttgaatagcacgatgtctccagtttttttctttttgcttagggattgccttgatcatttgggctttttgtttgttccagatgaatttttaaatagttttacctagctgtttgaataatgtcattggtaattttacaggaatcactttggatctacaaattgctttgggaattatggtcctttaaatgatatttgttcttcctaaccatgagcatggagtgtttttttgtttgtttcatctcagatttctttgagcagtgttttctttttctgaatttttgccttgaagaatctggcaaattgtattttacaaaggtggtcatgatgatatctcttatcctatacgcttttctccagtgtgattttttatatatattttttatttccatgggtttttggggaacaggtggtatgtggttccctgagtaactctcttaatggagatttgtgagatttggggtcacccatcacccgaggagtacacactgaacccaatttgtagccttttatctcttatccccttccctcccttttccccccaagtccccagagcctattgtatcatttttatgcctttgcatcctcatcgcttagctcccacttatgagtgagaacatatgatgtttcattttgaattaatgagttacttcacttagaataatggtctccaatcccatccgggttgctgttaacaccattaactcattcctttttatggctgagtagtatttcattatatgatggttatttgcactggtttcacatatttgcaattgtgaattatgctactataaacatgtgggtgcaagtatcatttttgttaatgacttcttttcctccaagtagacaccaagtagtgagattgctggatcaaatggtagttctacttttagctctttaaggcatcccacactgttttctatagtggttgtactagtttacattcccaccagcagagtaaaagtgttccctttcacctcatcccgtctaatgtctattattttttgatttttgattacggccattcttgcaggagtaaagcagtagcacattgtgcttttgatttacatttctctgatcattagtgatgttgagcattttttcatatgtttgttgcttatttgtatatcttcttttgagaattgttttttcatgtccttagccccctttttgatgggattgtttgtttttttacttgctagtttgtctaaattagttgtagattcttgatattcgtcctctgttagatgtacagattgtgaatattttctcccactctgtgggttgtctgtttactctgctgactgtttcttttaccatacaaaaactccttagtttaattaagtacaacctagttatctgtgtttttattgcattggtttttgggttcttggtcataaaatctttccttaagccaatgtctagaagggtttttctgatgttatcttccagaatttttatagtttcaggtcttagatttaagttcttaatccatcttcagttgatttttgtataaggtgagagatgaggatccagtttcattctcttacgtgtggcttgccaattatcccagcaccatttgttaaatatccacttatgcttattctccactttatgctttcatttcctttgtcaaagatcagttggttgcaaatacttgggtttatttttgggttttctattctgttccattggtctatatgcctatttttataccagtaccatgctgttttgatgactatggccttatagtatagtttataatcaggtaatgtgatgcctccagatttattctttttgcttagtcttgctttggctatgcagattcttttttggttccaaataaattttagaattcttttttctagttctgtgaataatgatggtgggtattttgatgggaattgcattgaatttatagattgcttttggcagtatggtcattttcacaatattgattctactcatccatgaacatgaaatgtttttcctttttttgtgtcatctctgatttctttgagcactgttttgtaattatcatcgtacagatatttcacctccctagatggctgtatttctaggtattctattctttttgtggcaatcatgaatgtgattgtgttacttatttggctctcatcttagctgttgtaagaaagaatgatagagatttttgtatgttgattttgtatcctggatttctctaaagttgtttatcagcttaagggccttttcagctgagactatggggttttctagatacagaatcatgttgtctgcaaacaagaatcatttgacttcttttcttcctctttggatgcccttttttcttactcttgtctattgctctggccaggaccttcgctaatatgttaaataaaagtggtgagagagagcatctttgtcttgtgccagtttagaggggaatgctttgagcttttgcccattcactctgatgctagctgtaggtttgtcatagatgactcttattattttgaggtatgttccttcaatactcagttgattgaggtttttaacatgaaaaggtgtcgaattctactgaaagccttttttgcatctattgagataatcatgtgatttctgtcttttgctgtgtttatgtgatgaatcaaatttattgattggcatatgttgaaccaaccttgcatgccaggggtatagcctacttgatcatggtgggtaagcttttttcatgtgctgctggattcagtttgccagtattttgttgaggatatttttattgatcttcatcaaggatatttgcctgaaatttgttgttgttgttgtgtctctgccaggttttgatatcaagataatgctggcctcacaaaatgagttaggcaggtatctctcctcctcaatttgttggaatacttccagtaggaatgataccagctcttccttgtatacctggtagaattcagctgtgaatccatctggccctgggccttttttgggtggtaggcttcttattactgattcagttttggagctcattgttggtctcttcagggattcaatttcttcctggttcagtattggtcaggtgtatgtatctgggaatgtatccattttctgtagattttttagtttgtgtgcatagaactgtttataatctacctgatggttgtttatatttttgtagtgtctgtggtaatatcccctttgtcgtttccaattgtgtttatttgaatcttctctcttttcttgtttattagtctggcatgcagtttattttgtcacttttttcaaaaaaatgaactcctggaatcattgaatttttgactggttttttgtgtcttgatctcctttggtttagttctgattttttatatttcttgtcttctaaatttgaggttgacatgctcttggttctctacttcttttttaatttcaaaattaattttttcaaaatcgtcacatggtaggcattctctagttcttttaggtgtgatgttatgttgctaagttgagatccgtgtaactttttcatgtcagcatctagtgctataaataatccttttaatactgccttagctgtgtcccagagattttgtatgttgtattatttttctcactagtttcattgttctcatcagtttcaaaaaacttctcagtttctgacttaatttcattatttacccaaaagtcatctagtagcagggctattccatttccatgtcattgtatggttttgagtgatttccttagtcttgatttctaattttattgagctgtaatctgaaagaaggattgctatcatttctattcttttctatttgttgaggagtattttatgtctgattatgtggtgagttttagagtatattccatgtggttttgagaaaaatatatattctgttgttttttgggtgaaaagtcctggagaagtctatcgggtccatggatcaagtgctgagtctaagttctgaatgtcttcgttaattctctacctcaatggtctttctaatactgtaagtggggtgttggagtccctcactattactgtgaattctattattcaaagtctcttggaaggtctctaagaacttgctttatgaatctgggtgcttttgtgctgagtgcatatatatttaggatagtcagatgttcatttgaataaaactctttaccatttggaaagcccttagacaacctttcaaagtgacttggagccccagagcactgtaggatttgctggaattcaagttccagccaatgggataaaagattccccttggctaaggctggtttaagtgctccctcagttggcatgcaagactggagttgcaacactttttcttatcacttcaatgcctctttcagcaatacagagttaaaaacaggtactacgagggcctacctgattcttggttctcatggaggtgctttttctatacggatgttacaagatagagtgtcctaaatgtgagttgtccaagttcttggcatattggaaaaataaattgaacaaaatgccacagagtgggcacagatttattgaagacaatttacacagtggaagcagactccacttgagcaagcagctgcttaagagccccatcaagggccagacaaggtggctcacacctgtaatctcagcactttgggaaaccgagaagagcagatcatgtgagtccagaagtttgagaccagcctaggaaacgtggtgaaacccagtctactaaaaatacaaaaattagccagccatagtagcacatgcctgtaatccccgctactcaggagactgaggcatgagaattgcttgaacccagcaggcaggggttgcaatgagtcaagattgcaccactacactcctgcctgggtgaaagagtgggactctgactcaaaacacacacacacacacacacacacacacacacacacacacacacacacagagccttctttgtttttttttccagtatctgaaaacagctttatggtatatttatctctgtgtatttatttatttatttttaattattattatcctttaaattctggaatacacgtgcagaacgtgcaggtttgttacacaggtacacatgtgccatggtggtttgctgcactcgtcaacccatcatctacatcagatatttctccgaaagctatctctccccttgttcttcaacccccaaaaggccccagtttgtgatgttcccctccctatgtgcatgtgttcccattgttcaactcccacttatgagagagaacatgcggtgttaggttttctgttcctgtgttagtttgctgagaatgattgtttccagcttcatccatgtccctgcagaggacattaactcatccttttctatggctgcatagtattctttggtgtatatgtgccacattttctttatccagtctatcatttgggttggctccaagtctttgatattgtgaacagtgctgcaataaacatacgtgtgtatgtttctttatagtagaatgatttataattctttgggtacatacagtaatgagattgctgggtcaaatgttatttctggttctagatccttgaggaactgccacactgtctcccacaatgattgaacaaacttacactcccaccaagagtgtaaaagcattccaatctccacatcctatccagcatctattgtttcctgactttttagtgaccaccattccaactggagtgagatggtatctcatcgtgattttgatttgcatttctctaatgaccagtgatgatgagcttttcttcatatgtttgttgggcacataaatatcttcttttgagaggtgtctgtttatatccttcacccactttttaatgggattgtttgggtttttttgtgtaaatttgtttaagtttcttgtagattcttgatattagccctttgtcagatggatacattgcaaaaatttgcccccattgtataggttgcctgttcactctgatgattgtttcttttgctgtgcagaagctctttagttttattagatcccatttgtaattttgggttttgttgccattgcttttggtgttttagtcatgaagtctttgccgatgcctgtgtcctgagggtattacctaggttttcttccagggtttttttttttgggatttaggtcttacatttaagtctttaatccatcttgagttaatttccatataaggagtaagaaaggggtctagtttcatttttctgcatatggctagccagttttcccatcgccatttattaaatgtgcgcatggcacatgtatacatatgtaactaacctgcacaatgtgcacatgtaccctaaaacttaaagtataataataataaaaataataatcataaaaaatatgtaatcctttccccattgcttgtttttgtcagatttctcaaaaatctgatggttgtagatgtgtggtgttatttctgaggtctctcttttgttccattggtctatacatctgttttggtaccagtaccatgacatttggtttctgtagccttatagtatagtttgaagtcaggtagcatgatgactccagctttcttgtttttgcttaggattgtcttggctatagtgaagaaagtcaattgtagcttgatggggatagcattgaatctataaattagtttgggcagtatggccattttcatgatacttgttattcctatccatgaacatggaaagtttttccatttgtttttatcctctcttatttccttgagaagtggtttgtagttctccttgaagagatctttcatatcccttgtaagttctattcctaagtactttattcactttgtagcaattctgaatgggagttcagtcatgatttggctctctgtctatcattggagtatagaaatgcttgtgatttttgcacattgattttgtatcctgagactttgctagagatgcttatcagcttaagcagattttgggctgagacaatggggttttctaaatataccatcatgacatctgcaaacagggaaaatttgacttcctcttttcctatttgaatatactttatttctttctcttgcctgattgccctgtccagaatttccaatactatgttgaataggaggggtgagagagggcatccttgtcttgtgccagtttccaagggaacacttccagcttttgcccattcagtgtgatattgcctgtgggtttgtcataaatagctcttattattttgaggtacgttccatcgatacctagtttattgagaatttttagcatgaaggggtgttgaattttatcagaggccttttctgcatctattgagataatcacgtagtttttgtcattggttctgtttatgtgatggattacatttattgatttgtgtgtgttgaagcagccatgcatcccagggatgaagccgactgatcgtggtggataagctttttgatgtgtttctggattcagtttgccagtattttattgaggattttcatatcgatgttcataagggatattggcctgaaatttcctttttttgttgtgtctctggccaggttttggtatcaggatgatgctggcctcataaaatgagttagggaggagtccctctttttctatcgtttggaatagtttcagaacaatggtaccagctcctctttgtacctctggtacaactcagctgtgaatctgcctggtcctgggctttttttggttggtaggctattaattattgcctcaatttctgtgcttgttatttgtctattcacggattcgacttcttcctggtttagtcttgggagagtgtatgtgtttatgaatgtatccatttcttccagattttctagtatacttgtgtagaggtgtttatagtattctctgatagtaatttgtattactgtgggatgagtggtgatatcctctttatcattttttattgtgtctatttgattcttctctctcttcttctttattactctggctagcagtctattttgttaatcttttcaaaaaaccagcttctggattcattgattttttgaagggttttttatgtctctatctttttgagttttgctctgatcttagttatttcttgccttgttctagcatgtgaatttgctcttgcttttttagttattttaattgtgatgttagggtgtcaattttagatattttccacctttttgtgggcagttagtgctataaatttgcctctaaacactgctttagctgtgtctcagagattctggtacattgtgtctttgttctctttgatttcaaagaacttacttatctctgccttagtttcatcatttacccagtagtcatatacctttacattttaaaatacccagacaactgtcattggattgtgtgcaacagaaaagataaatgcttgagtagacggatgtcctactctctgtgatgtgattatttgcatccctatatgatattttatgtaccagattaatgtatacacctactatggacccacaaaaattaaaaacaaatgacagacaaaagactaatatacacatgaaaacatatgccacgtcacgggtcattagggaaatggaagtcaaaaccaccatgagataccacttcacactcattaggatggctattacattaaaaaaatgaaaactaacaagtgtgaggatgtgaataaactggaacccttgaacattgctgtttggaatgtaggatggtgtggctgctgtggaatatattatgcagttcctcaaaaacgttactcatcataatatacatctctttggcaactgggatcaattttttctataaattcaataatgtcaattcactgacaataaaactgaagagaaaagtgaagtaagagggagaagaaagcaaaggaggaagggaattctaattcactccatctttaaattctaatacaggtattaaggatgcttcccttcatcacgaaaagagaacttgaggaggggtcctgagtctcccaccccaggtgaagaagacttcattatgactgaagtccaatcacctgtacctgcacatgtcctcacacagtctggaactaaggagcacacaaatcaagaactagacttaagaatctcaactttctccctgaatctgcaggagaaagagtgtctctgaaaatttttattcctatggacactcaatgaaaagaaaagggtgcagctagagcccaggtgtgtgagatgcagatgggaacagccctcacctggcagagccaaggggaccagtgtgggatcggggaacacaagggctttctctaccttcctccataggtcctgcttaggatcaagaccagtgttcccccagaacctctatagggaaagggaaaggttatctttcactaccaatgatttctacaagaatcttcactatttttaccattgtacaaattaagaaaatgtacaccttcttgggaaattatgcacagtgaagagaaggcttaatgagaggcatggatgctggacttcacaatccctcatcttcactccatcatccttatctgtgcatttccctggtgaccccttcctcccccggtacctctatcactgtcatttctgctgcatcacagacacaggcttgcaaacaagtgtgattgtgactgagtctgtttctgacaccttaccccttctcaccctgtgggaatccttgctgagagtgtcttggaatcaggaatgaagccgcatggcagggctgacagggaccatttaaatgctgcaagtccaagacattcacactgaagcctagacacaattcagaagagccaacctaagggagcaaatatgtcacccctacctgtgagttgaaaaggcacacccttcaataacctcaagtcacataaaggaaggtggaatagagactttatgagatgaaaatgtgagagtttgtattgtgagtgctttactagagttgtgtgtgtgcggaagacagagaccctggggctatggtgtctgagatgtttgtggggtgttgagtgtggaccctggaccagtgtaaccttttgtgagggtgcaatggcatctgatgagagtgaactctgctgagatgatgtgactttaggtgggaggtggagaggccaccagcatgggtgaaacgtgcctgagtgtaagagggtgactgtgttttgtcttcctgtctgtgatgtgtgtatgagcacagccagaccaatgcatgagcacctttacatgcacagtgagtaggcatgtgtgactcagtgagtggcgtggctctgtgtgactgtgggtgtgtgtgctgggatatgacttggtgttgaactgggaacatacatgtggctttctgtccatgtgaaggttcctcctcacacagcagggcctctgatgaagcagctgtgcatcttcccatgtgtgtcaatgtggatgccgggtggcagaactggtggggatcttggggactgggagttaccaatgactcgtttgtgagcattaatgagagcagaatgtatgatctgtagaggtctcttcccaggcagagtggaaaagaggaatccagactatgggaacgatggttccttaggtggggtctgcacacagtgaccatcatctcctccctgtcatcctcaggtctcttcctgtcccccacccaagcctgcccttcccattctagttcaggagggtatgcaaatcctgactctctgaggaataacattagagactgtggtttcagagactgaatcaccccaaaccgggaaggaacaagtgtagcctcagttcagatagagcttactgtggatattaatcatcaaagtagcagggtttgctggctcatgcctataatcccatcactttggtaggcaaagataggaaaataacttgaggccaggagtttgagagcagcctgggcaaaatagtgagacattgcctttacaaaaactttaagtaacagacaagcatagtggcgagcatctttcattacggctactcagaggccaaggtgtgagaatcccagcagcacagaagttcgagactttagtgagctatggatgcaccactgcacatcagcgtgggtgacagaggaagatcatgtctcaaaaagaaagacaaaatatccacttgtgggttctctctatctacttccttaacccacactcttcatttgtctaagtgctggggctgtgctttcaacaacttttacaacttctgggaacgaagtccgtggcccttgatgactgtgatgcatgttcatcccacacacaggggtttcctgttcttttgttatttccctctctcgttcaacaagtgttgcttcttactggaatggatttctctactgttacatcctcaggtcttgttttcacagatattaatttctctaagatcaccctacaaagtaagaatttctaataaagacaaaaaagtaaaaagtgtagaaagtagaggaaagaaagagtttaaataatcttccttgtacatgggaaattaaattaggcagcgatcaagtaatggatctatgattgcactgccagtaagaggcacaatcaggactggagtccaggaagcctggcttctgaatccttgctcctcatgtctttaggaatatggagttctgactgcgatagggtgaaagaggtaagtcctcacagtttgcctgttgatctctaaccttctgcatcatgggaatgtgtcacaaagctggaggccgcacctggcctggcccctctcacccactctcaatctcctagcaagtgccacacacaaggcctgtgtccttgtccattggttcttgcatgacaatcagagggacatcgatcatccctttcaagtgagtactccatggtccatggcacaggggtggaaaagaaaggagaatatttactcaggacgtggtctcatgtgggtaatgtggaaatgtgtagttggcaggatggaggtagcatgccactgtagatcctggggaccctccagcaccaggcatgaaacctgcagtggctaaactctgggctagtcatggggcctaggggaagaggacactcaaaggttggggctgtggctctttatcaaggggcatggaattttcagagaatgaacataggcccaggtaagtgactgtggctcactttccatcttttgatgaggggcagagcacgtccccacgtgggggaaatatgaggagctaaaacagccccacagggacgaggcctgtagtatgacaagggagccttcgttctgtactggggaaagaaaggaagggatttgtgtgtgtgtgttgattgtgtgccccacaagggaggggcctgcccaacacttcgtatgctttgccctcagcaatcattcagcgctgcagatggaattctacactgggacaaatgaggtctcagacattcccttccatttctgagtgcactttggccattgtttggtcattgacagccgtgtgtggcctggacgtatgagaggagctgcaacaatgggttctttgagaatggcaaaccatttgatctgagcatcttggtgctggacaatgaatacaaggtgaatgcccaaggagctcccaatacctggccttcttgggctctgagagcagaaggcagctctccctggcctggccccagtagttgttcaggacccatctctcataactactcctgccccgggcacagcaccctctgcttgcactgcctttctcagctcttttccaaaatctgactaggatcaaggtcatcacacctaggatttcccccaaagtgtagaatctcctcagtcttttcccattgtgctcacttctacttatgcagttatttaaattttcacttagctgaatgaatacaatatccataagaataaaattgttttagtcaacgaaaaattaagtccttctttcactcctggacccaatcttattcctgggagcattaccagtgctctgctctccttccacagcaaatctttgcttatggaaacatatagatctataatttcacttgtttttaagaaaatcccagtatacattgctctacacattacaccttaaaaactgatttgatttgttgtcaaagaatataccttgaggatcccgtctactaatggtgcttcctcagtttttaaagattgcataatattgcattagaaggattacccaaaattactgaacttgactgttttgatgggacttgaggttatttccaatattttgctctcacaaatggtgctgtattaagacttctagtaatttattttgtcattatccacctcccttacttatactgaaagataattacaaagaaaaaaataactggttcaaaaatgtgtgtattttaaatttaacaaattgacacctagaaggttactttatagcctcagtaataaagaatatgtcccaatgttctggccctttctaatggataggccaaaagattcacattttattcagattcaagtgagggatctctttctatgcttagaagctgttcaaaatgatagtctatgttttgcaacacttgtccaattgggcctctccaacaacacttgagttttattcttggccaccatcagcccgaatctaggcaactccaaagggaaagtaggccatcagcagtgaatggcagtcatagttcacggaaatgaaagatatacattcaatgaacatggtctagcgttaaccctgtgtgaacccctctgcaagatgcaggattcaagttcatgaaacagtcactagccatggggattttccaagctagaggggaggctgagcaagcacggaccatgtgacacagagtggtagagccttgctggaagaatgatatgaaacattagaaagaaagtaagcaactctctaaaataagcacaaatgttaacatgtaaatagaagtgtgtgtcttgggttcagttatatagctagtagttttctcaggggatgttgtaggtagtaggacagagtggagaggaggctgaaagcttgtttggtggcatactgtctttctgatgcattttccctcttttaggtaataataaatggccaacactgttacatctttgcccatctacttcaaccatattctgtgaagataatgcaagtgtggagagatgtctccctgacctcaatgtctgtctgcaattgagggagatgaccacatccctcactgttgaggaatgctgcttttttaaattatattttaagttttagggaacatgtgcacaacatgcaggtttgttatatgtgtacacatgtgccatgttggtgtgctgcacccattaactcatcatttaacattagatatatctcctaatgctatccctccccactccccccaccccacaacatgccctggtgtgtgatgttccccttcctgtgtccatgtgttctcattgttcaattcccacctatgagtgagaacatgcagtgtttggttttttgtccttgtgatagtttgctgagaatgatggtttccagcttcatccatgtccctacaaaggacatgaattcatcagtttttatggctgcatagtattccatgctgtatatgtgccacattttcttaatccagtctatcattgttggacatttggcttggttccaagtctttgctattgtgaatagtgcctcaataaacatacgtgtgcatgtgtctttatagcagcatgatttataatcctttgggtatatacccagtaatgggatggttgggtcaaatggtatttctagttctagatccctgaggaatcgccacactgacttccacaatggttgaactagtttacagtcccaccaacagtgtaaaagtgttcctatttctccacatcctctccaggagacctgttgtctcctggctttttaatgattgccattctaactggtataagatggtatctcattgtggttttgatttgcatttctctggtggccagtgatgatgataattttttcacgtgtcttttggctgcataaatatcttcttttgagaagcgtctgttcatatccttcgccatggaatccctctttctatgtgaccacagaatccccagagcctactgacagcatggtctctcctcaccctttcccctgcacttggtcattaaaacatcaccacacttcccaggatttggttcttgctttaatggggaaagaggaagtcatcatcctcaagaaggcccaaggaactttatgggaggcatccagaaaccaaagtggataaaccttcttgtgactccgggagtgacaaggtccttagaatgtcttagaagtcattatgtacggcatctttctacagcacattgttgacatcagagactctgagacaaataccttacccaatcttagatgactcactgcactgaaatgttaggtagctgtttaaagcctcacaggtgtacctcgaggctttggggagaaattttgtaacttgaggacaatctggtggaattttctaattatttccattgttctcaggatatttattgtgtaatcacggtgcctggctttgtacaggctaccatgcagaaactttagaaacagacacacttcccacatgaaaacttcaatccaagcaatagttagagaatcacaagagtcccaagatttcccttaaagaaccccaattgttgatgtttaaaaataatagcgagatttttctgatgtaagtggcagaatccttgaatttctatttaaaaataaatggttatggttttagatcagaaaatatgtagtttattgttgggatgaacacaattcatacatatggacacagtgagcagaccttgctttgttgctgtttcactaggcattgcagcacagcaaacctcccaacacatgttggcttagagcaatcttttcttctgatcttgctcagttaactggactcatgtgggtggtagatcatgtagtgaaagtgacgttttctgaaggatatttcaggctgtgattccagaggatgcttcactcatgtctgactcaacactagggctgggcgaacacctggggctggctggttatttcctttcctacctcacctccaaattcatgccttgaattccctcaaatcatgagagtctcctgtttcttggactgaatgatgataggcttccaccaaagcaagcctcccaaaaggctcaggaagaaggtgcaaggtatcataggacctagctttgaaaggcagacagtgtcacttctatgacattatattgatcaaagtgagccatacacacagcccaaatcaaaggaagggaacttcataagctgtggttattgtgacatgtggtcatgaaggagcatccttggcaattatttccactcggtcctcactggcttacaagcttctcatatatcaaggataccaatcctgtaaggaaccactgaaggcaacatgtttacaggaacaggctcagattgaagtctagtattttatcatccaatcaggatctggtgtccatgaggtgactacaaattatcaggtgcactttcaacatatgcactaaagaaatatattatctgccctataaaattaaacatacaagactaaaacagatataggaaaatgcagtgaacacacttattttagaggggcaaaagataataaacaacaaaactgaaagcaaggtgggtcaccaatagctctactggagccacccacaaaaattcagccagggttctcactcttattgcatctgctcaaaccagcatgacctattccgaaaatgttgtcttgatatgtgccgcttctgtttccataagtgcttaaaggatatagatttcattaggttagactaagtgatcttccttcaatttataagcaagacatccactcagtgaaagaaaccatgctagctctttgtacatgaaaaaaaaaattaaaacaaagaaaccaattcaaaaaaaaaaaaagacaaaaaaggcagccatcactggtccatatcattgctgaaaccaacaagacccccatttgcatcttctctgaaaatgtttctctgccacagttgtctccaccttctactgtcagtgtcttagagctcccacaaagatggcacaatgaaaacccttttcctgctacaagagctgttgtcacctatttcatgacacaaatagagaaccatttaggagaagataaacaacatattacctaaaagccaaacaatgcagattgaagagggtctcaacaaatagcctctttgtctgcagggcccatctaaggcatcattttgatcatcctcattctccgttctcatgttccttgccacagtttgttcaactccaaccttactcatgggtatgcctcccgttttgccctcctttaacctaacatccagatacctttaggtgtcaatgcacagtaaataacactctcatgcctctctttcttgtttctttcctgtatgaactgaaattcccttcattctcactggggagtctcaggttcttgttagacacattctcctccttatatcttccctctcacagttttgttcacttctctgttttgatgatggatcacaggccccctcatcagcatggaaatcattttttggggaattagacaattcttgctctcagtggataaagacaatcttggaacccatgactttctgatcagaacacgagtttgatttcatatctacatgcccctggttgatgcccattgtatttgaatagcttacagggtcctacatgctgtccctgccaggcaaacacacagtgactgccttttcttgactgatattcaccagctcagttcagttcatataagccttttgttacacttatctttataccagctgctgccctgtgctcttggtggccaagagagatgtctgagatgaaaagagaaggcatagagtccaggaatcaatgttcaacaaacgatttttgatttgcctctggggacctactcaacatatttttcatacagataaaccggaattcatggtcttctcccagcaaacacagcattgctcagaacacagcatttctggactctaaagccttgccttctgaaaggtctgtagggcttttcagtttttgatgaaagcccccaaagaataaatctactctgctaatgttgtccttgatgcccaagtcccctaaagctgtttcctctaaggtgctgtccgtggtactgggcactggtgcttctgggcctgtatttgcaagtgaggggccaataagacagaattaacataaattttttgttttgttttgtatttgataaatcacagctcaaaatatgtataatgaatggagcaggaattgaatttggatcttcagaccccaatttctgcagtgccctctctcacccctcctattcaacatagttttggaagtcctggccagagcaatcaggcaagagaaagaaagaaagggcatccaaacaggaagagaggtcaaaccatccttgtttgtagacatgatttcctatctagaaaacctcatagtctccacccaaatgatcctcaagctggtaaacaactttagcaaactttcaggatacaaaaccaatgtgcaaaaatcactagaactcctatatgccaacaacacgtaagcatatggccaaatcagaagttcaattccattcacaattgccataaaaaataaaatacctaggaataataaactacaacctgaaagtaaaatgggtcaccaatagctctactggagccacccacaaaaatttagccagggttctcactcttgttacatctgcttaaaccagcatgaccttatccaaaaatattgactcgatgtgtgccacttctgtttccataagtacttaaaggatataggtttcattaggttaggctaagtgatctgccttcaatttataagcaagacatccactcaatgaaagaaacagtcaatgaaagaaatccactcaatgagagaaagctaaccagtgggtgaaagatcgttacaaggataatttcaaaacactgcctaaaaaaacatagatgacccaaaccaatggaaaaacactccatgctcatgaatagcaagaatcattatcattaaaacagccatgctgcccaaagaaatatacatattcaatgctattcctattgaactaccaatgacatttctcacagaattagaaaaaaaaaaactattttaaaatgcacatggaaccaagaatgagttgattaaaaaagacaattctaaacaaaaagaacaaagctagaagcatcactttacccaacttaaaagtatactacagggccacagtaactgaacagtatggtactggtacaaaaacagacacatagacaagtgggacagaatagagagcccagaaataaggtcacacacctacaaccatctgatctttaacaaagctgaccaaacaagcactggaaaatgaactttctcttcaagaaatggttttgggataactggtagccatatgcagatgattgaaactgaatcccttccttgcattatgtagaaaaaatcaattcaagaggggttttaagacttaaatgtaaaacccaaaactataaaaaccctggaagtctacctaggcaatatcattctaaatgtaggaatggggaaaagtttcataacaaagatgccaaaagcaatcacaagaaaagcaaaaattgacaaatggatctatttaaactaaagagcttctgcacagcaacggaaactatcaacagagtcaacagacaacctacagaattggagaaaatatttgcaaattatgtatctgaaaaaggtcttatatctagcatctataaggaattgtaattactttacaagaaaagaacaaacaactgcataaaaaagtgggcaaaggggccgggcgtggtggctcacgcctgtaatcccagcgctttatgaggtggaggagagcggatcacgaggtcaggagattgagaccattccggctaacatggtgaaacccttctctactgaaaatacaaaaaattagccgggtgtggtggcacgcacctgtagtcccagctactcgacaggctgaggaaggagaatctcttgaacccgaaggcagttgttgcagtgagccgagatcgcgccactacactccagcctgggcgacagagcgagactcgatctcaaaataaaagtaggcaaagggctgaatgcggtggctcatgcttgtaatttcagcactttaagtggctgaggcaggtgcatcgcttgagcccaggagagaccagcctggacaacatggtgaaaccctatctctacaaaattagaaaaattaggcaaatgttaccccatgcaccagtaatcccagctactcagaaggctgaactgggaggatcacctgagcccaggcacaaattgcagtgagccgagattgctccgctgcacttcagcctgggtgtcagagtgagaccctgtctcaaagaaaagtagacaaaggacaggaacagacacttctcaaaagaagacatacatgtggccaaaaagcatatgaaaagaagctcaacatccctgaatgttagaaaaatgcaaatcaaaaccacaatgaaataccatctctcaccaatcagaatggctactcttcaaaagtcaaaaaataacagatgctagcaagcttgtaaagaaaagggaacacttacacattgttggtggtattagtttaaccatggtggaaagcaatgtgatgattcttcaaacagctaaaatagaactaccatttaacccatgtatcccatcactgggtatataccgagaagaatataaatcattctaccataaaaacatgtgcatgtgaatgtttattaccacagtattcacaatggcaaaaacatggaatcaacctcaatgcccatggaggacagactggatagagaaaatgtggtacatatacaccatagtattctatgcagcctcaaaaaagaatgagattatgtcttttgcagaaacatggatggagctgtagaccattttccttagcaaacaaatgtggaaacaaaaaatgaaatgctgcatgttctcacttagaagtgtgagctaaatgatgaggctcatggacaccaagaggggaacaacacgcaccggggcctacttgagagtggagggtgaaagatgggacaggagctgaaaaaatgactattgggttctaggcttagcaactggatgattaaatgatctgtaccacaaacgcccatgacacgagttttcctgcacatgtacccctgaatgtaaaataaaagtttaaaaaacaaagaaaaaaataatctcatctttcttctggaatctgcagcacaaccagtatccctgaaactttgatttacatggacaccaagagaaaggagagggtatagctagagcccagatgtgtgacagacagatgagagcagccctcacctggtagagccaatgggcctagggtggggcaggttcatgccaggactttctctacctctctcccagatcatcctgaggatcaagatcagtgctgtcccagaatgtttaaaggcagaaagaatgattaccttctagagccaacgactttaccaagaatcctcaccttaaaaaaatttatttttgtacaaattgagaaaatgtatatcttccgggtagattctctccggtgtagaaaaggtttgaggggcacaaaggctgtgctttaaaatcattcttccttgctccctcatcattatgcttgcatttccctggtaacccaatccacagcctagtacctctcccagtataatttcgctgcattacagacacaggcctgcaaacagctatggttttaactgagtttcttcctgacagctgagcctttctcaccctgcaagggaagcttgctgagaggaaattggaatcaggaatgaaagcagagggcatggtttacagggaccatttaaatgctgcaactcaaagattcacacagaagcccggacacaattccgaagttgcccagaggaagcaaaaatgtcagagctacaggtaagttgaataccctttatttctttctcctgcctgattgccctgaccagaacttccaacactatgttgaataggagtggtgagagaggcatccctgtcttgtgccagttttcaaatggaatgcttccagtttttgcccattcagtatgatattcgctgtggatttgtcataaataactctcattattttgagatacgtcccaccaatacctaatttattgagagtttttagcatgaaggttgttgaattttgtcaaaggtcttttctgcatctattgagataatcatgtggttttcgtctttggttctgtttatacgctggattacgtttattgatttgcgtacgttgaaccagccttgcatcccagggatgaagcccacttgatcttggtgaataagcttcttgatgtgctgctggattcagtttgccagtattttattgaggatttttgcatggatgttcatcagggatatttgtcttaaattctcttttttggttgtgtctctgccaggctttggtatcaggatgatgctggcctcataaaatgagttagggaggattccctctttttctattgattggaatagtttcagaaagaatggtactagctcctccttgtacctctggtagaatttggctgtgaatccctgtggtcctggacttttttggttggtaggctattaattattgcctcaatttcagagcctgttattggtctatacagagattcaacttcttcctggtttagtcttgggagggtgtatgtgttgaggaatttatccatttcttcagatttctagtgtatttgcatagaggtgtttatagtattctctgatggtagtttgtatttccgcgggattggtggtgatatcccctttatcattttttattgggtctgtttgattcttctgtttttcttctttattagtcttgctagcggtctatcaactttgttgatcttttcaaaaaaccagctccgggtaatggagtaatggatcttttcatatgcttagaagttgttaaagataatatcctgtgttttataatacctgtcctgctttacctttgtaagaatgcttgggtttcattttctgccaccattagcccaaatttgggctactgctcaacagtgaatggcagtcatggttcatggagctgaaatgaatgcattcaatgaacattgtcgaggactaaccctgtgagtggccatgtgcaagatgcaggaattcaagttcatgggcacagtcccttgccatggaaatcttctaggctagaggggaggctgagcaaacagggaccttatgacatggagtggtagagcctcaacagaagcttgtctactgggttcagttgtctgactaggagttttctcaggggaagttgtagtactaggacagagtggagaggaggctgaaagtttgtttggtttggtggtgtactgtctttctgatgcattttttccttttgtaggtaatggtaaatggccaacactgttacatatttgcccatcaactcctgcaagcatctgtgaatatgctctggatgtggagatgtctccatgagctcaacatctatgtgcagttgaaagagatgaccacaatccttgttgttgaggaatccctctttctacaagaccatgggattcccagagcctgttaacagaataatccctcctcaatcctttctatacacttggtcattaaaagttcggcaaattttccaggatttgatagtcatcccgacaggcgctgaaagattacatgggaagcattaagacatcaaagagtaaaaaccttcctatgactcaaggagtgagtaacacggtccctggaatgtctgagaaattaaaaacggcatccttctatagcacatagttgacatcaagcactcaactaaaacccttactcaatctcagatgactcattgcaaatgttgggtagctgtttacagccacacaggtataactggtagttttaagaagaaactgtaacattaggacaatcaggtggaatatcataattctacccgttgttccaaggatgcttactgtatatgaacactgtgcctcactctgtgcagactgccatgagggaactttagaaacagatgacaaattcctggccaggcgtggtggcttacgcctgtaattccatcactttcggagaccacggtgggcagatcacttgaagtgaggagtgtgagaccagactgcccaacatggcgatgccgtctctactaataatacaaaaattggctgggcgtggcagcaagcgcctgtaattccagctagttggaagggtgaggcatgagaatcacttgaacccagcaggcagaggtggcagtgagccgagtacacgccactacactccaatctgggtgacagagtaagactctgtctcaaaaaaaaaaaaaaaaaaaaaggcaaattacccacataaaaattttgctccaagcagtagttagagaatcacaaaagtttaatgatttctttcaatgatcctgattattcttgtttctaaatacttgaaatattttttcaatttatgtggacagaattctgggatttctctttggaaacaagtggtcatggttttcagatcagaaaatatgtagtttattgttgtaatagacacaattcatactacacacaggcacagtgaggagactctgctttgctgctgttacatttagacattgcagcacagcaagccttccaacacatattagctgaaagcaaccatttattctgatctctcccagctttgcaggtttactggacttatgaggttggtagatcatgtgctgggagtcacattttccaaagaatctgtggtctgggattccaggggatgcttcactcatgtctgactcaacactagggctgagtaaacacctgggggctggctggttatctccttctttgtctaaactctccattagtgccttgaatttcctcaaatcatgagagtctcatagttcttggacttaatggatggtgattggcttccaccaactaaagccttctgaaaggctcaaggagaaggtgtagggcattagagtacatagctttgaaaggcagacattgtcacttctatgacattatattgatcaagttgagtcatgcaggcagcccaaatcaaagaggaatccacaagctttggttattttgacttgtagatcctgagaggtcatccttggcaactatttccacgcagttccacacttatatgtgtaagtgtgtatataggcttacacacttcccacatactaaaaactctaaccctgtaaggaactactgaaagcaatacaattacaggaggcagctcagattgaagtccagcatcttatcatccaattactctcagatgtccatgaggagactacaaactgtcaggtgcactttctctcaaaatatgcaccaaagggatacatatttgccctatacaaatcaatcacacaagactgaaacagacaaaggaaaatgcagttaacacaactattttagaggggcaaaagataacaaatggcaccttttgcctcatagcactctgagaagcaagaggggtcaccagcagctctactagagccacttatgaaaattcagcctgggttctcactcttgtcgcatctgctcaaaccagcatagtctgttccggaaatactacctcaatgtgtgcccccagtgtttccataagtactttaaaaacatacatttcattaagttggactaagaggtcttctttgaatggataaccaaggcatccacacaacgaaagaaaccgtgttagctctttgtacataaatttaaaattcaaacaaacaaacaaacaagtacagaaaagaaaatagaccacagtcacggtccatatcactgaggaaaccaacaagatctcttttttcattttctctgggaacgtttccctgcagcaattggcttcatcctccattcttagcttcttggaactcctaccaagatggcagaatgacagtcctttttccactacaagagttttgattatctacttcatagtgcatatagagaaccatttaggagaagataaacaacatatttcctaaaagtcaacgaaggatgattgaagagagtctcatcaaatagccttttttctgctgggccaatctcaggcatcattttgatcatcgtcatcctctctccccaggttcattgccacagcttgttcaactccaaccttactcatgggtatgcctttctctgtactgcttctttaacctaacatctggataccttgaggtatcaatgcacagtgaattatgctcttcatgcctttcttccttgtttctttccagtataaaatgaaatttcctcccctctcattggaaactctcaggttctgattaggtacactctcctccttacaccatccctgtcacagtcctggtcaattctgtattttgatagtggattataggctccatcaccagcatggaattcatttgttggggatttaggcaattctttctctgagaggatgaagactatcctggaatctatgacttcctgagcagaacatgagtttgatttcatatctgcttgcctctggatgacacccattttatttgagtggcctacagagtcctacatgctggccttgcaacacacacagtgactcccatttcttggctgacattcaccagctcatttctgttcacatgggccatttgttacactcatttttatctcaggtaatacgttttgctcatggtggccaggatgacatctcagacacaaagagatgacatagaattcaggagccaatgtttaacaaagaatttttgaattgcctctggggacctactcaacatcattttcatactcctcaaccaaaattccctatcttctcccagcaaatacggcatgctcaaaacacagaaagtcgtacttggactctaaagctttcattctcaaaggtatttaggctttttagtttttgttgaagcctcccaaggaataaatctatttggtgataatattgtccttgtccctcaaagctgtttcacttgtggtgctgtccgtggtgctgagcattggtgcattaggccctgtatttgaaagtgaggagccaatacgacagagtaagagaggaattttgttttgttttcttttgtatttgctagaccatagacaaaacctccatgatgactaaaacagaaattcaacttggattttcaaaccacaatttcttcagtgccctctctcctcacttctatttaacataatattggaaggcctgaccagagcaatcacgcaagagaaaagaagaaagggtatctaaatacaaagagaggtcaaaccatccctgtttgcagatgtcatgattctatatctagaaaactccatagtcttcacccgaaagatccttaagctggtaaaccactttagcaaagtttcaggatacaaaatcaatatgcaaaaatcactagaactcctatatgccaacaacagcgacagggacaaatcaagaatgcaattccattcaaatttgccataaaaagaataaaacacctaaaaatacagctaatcagggaggtaaaagatcgttacaatgagaattacaaaacactactcaaggaaaccagagatgacacaaagaaatagaaaaacattccatgctcatagataagaaaaaccaattatcattaagacagccatactgcccaaagaaatttagatgcaaggctatttgtctcaaactatgaatgacattcttcacagaattagaagaaatattattttaaaatttaaatggaaccaaaaaaatgccaaataaccggggcaattctaagtgaaaagaacaaaactggaggcatcaaattacccaacttcaaaatatactacaaggctacagtaaccaaaacagcatggtatcggtatgaaaagagacacacagaccaatggaacagaatggaaagccctaaataaggccacaaacctacaaccatctggtcttcaacaaagctgaccaaacaagcaatggaaaaaggactccctattcaagaaatggtgctgggagaactggctagccatatgcagaagattgaaactggaccccttctttacaccatatacaaaagatagattaaagacttaaaagattaaacccaaaactataaacatcctggaagacaacctagacaataccatgtgggacataggcatgagaaaaatttcatgatgaagatgtcaaaggcaattaggagaaaagcaaaaattgacaaacagaatctaattaaactaaagagcttctgtacagtgaaggaaactatcaagagagtaaacagacagcctaaggaatgggagaaaatgttctcaaactatgtatctgaagaaggtctaatatccgagcatttataagaaatttcaacaacttcacgagaaagaaacaaacaaacccataaaaaagtgggtaaagagcttgacacagtggctcatgcctgtaatcccagcgctttgggcaaccaaggctggtggatcacttgagcccaggaatttgagaacaggctgggtaacatggcaaaaacccatctctactaaaaatagaaaaaaaaaatagcctagcatggagacatgcacctgtagtcccagctactcaggagactgagcttagaaaaatcacctgagccccggagccagaggttacagtgagccaagatggtgccacatcactccagcctgaatgtcagagtgagacctgttttaaaacaacaacaaaaaagttgagcaaaggacacgaacagacacttttcaaaagtaaggatacaggtggccaaaaaacatataaaaaagctcaatatcactgaacattagagaaatgcaaatcaaaaccacagtgagataccatctcacaccagtcagaatggctgttattaaaaagtcaaaaaaggacagatgcttcaaggttgtggagaaaagggagaactcacacattgttggtgacagtgtaaattagttcacccattgtggaaagcagtgtggtgattcctcaaagagctaacaatagatctaccattcaacccagcaatcccatcactgggtgtatacccagaagaaaagaaatcattctgccataaagacatatgcacatgaatgttcattgcaacactatgcacaatagcgaagacacagaatgaacccaaatgccaatcaatgacagatcggttacagaaaatgtggtacatgtacacaatgaaatactatgcagtcctaaaaaagaatgatattatgtcttttgcaggaacatggatggaactggaggccattattcttagcaaactaatgcaggaacagaaaaccaaatactgcatgttctcacttatcagcgtgaactaaatgaggaggctcatggacatcaagagggaaacaacacacactggggcctccttgagggtggaggatgaaaggtggaagaggagaaaaaaaataacttttgagtactacacttagtaaccaggtgaagaaatcatatacaccacaaatcccatgacacgactttatctgcatatgtaccccgaacctaaaataaaatgaaagaaaaatcaaataaaaacaacaatctcaccttcctcccagaatctgcaggagaaacagtgtctctgaaacttttatttacatggacaccaagagaaaggagagggtgtagctagagcccaggtgtgtgacagtcaggtgagagtggcccttacctggcagagccaagcagcctagtgtggaataggttcatgcaagaaatttctctgcttctctccacagatcctcctgaggatcaaggtcagtgctctcccagaacgttcaaaagcagagagaatcattaccttctagggctaatgtatttccccaaaatctccaacttttttcttttcagccgttgtacaaattgggaaaatgtacactttctgggtatattctgcatagatgagaaaaggcttgagaggcataaaggctgggctttacaaccactaccgctcactccatcatctttatctatgcatttccctggtaacccaatccacagcctggtaactcccccactgtcacttctgctgcattacagatacagacctgcaaatagctatggttgtgactgagtttcttcctaacaactaaacctgtctaaagctgcaaggaaatcttgctgggaggagcttggaatctggaatgaagcccgagggcaaggctgaagtgggtcatttaaatgctgcaactcagagattcactcagaagactggactcaattctgaaggtcgccaagaaggagagaacaatgtcttctttacccgtgagttgaaaaggcacagccttcaaaaatttcgtgtcacacaaaccaagaaagaaatgggagattttatgagatgaaaatatgagcatttttgctgtgaatgctttacttagagctattgaggtgtggaatagaaaccctgaggctatggtatctgagatgcttgtggggattgcggtgtggaccctggaccagtgtaaccttcggtgagtgtgaggtggtgtctgatgagcataaactctgcggagataatgtgactttaagtgggaggtggattacccaccaggacgagcaggtgtgtgaatggagagtaaaggggtgagtcggctttgtttcctgtctatgatgtgagtatgtgtgtgagcacagccagaccagtgcatgagcatcgttatgtgcacagtgagcaggtgtgtgtgacgcagtgagtggtgtggctctgtgtgactgtgagtgtgtgtgctgggatgtgactgtatgttgaagtgggatcatgcatgtggctttcttcacatgtgaatgtttctccccacacagcagcacctctgatgtgaatcccatgtggcttaactggtggggatcttggggattgtgagttaccaaggacttatttcagatcacttgtgagagcagaatgtatgatcagtagatgtctcttcccagtaagagtggggaagaggaatgcagactatgggggtgatggttcctcaggtggggtctgcacagagtgaccactgtctcttgcctcccaggctcagcttgcctgtccctagcccatccagttcttcccactgtgtgacaggagggtgtgcagatactggtttgttagggaaggacattagaggccgtgatttcagagactgaatcacacaaaatatccactgtaagctctgtctgaactgagactaaacttgttctacacccatgaaagaacaagttaagtctcagttcagaaggagcttacagtggatattaatcaaccaagcagctgggttcactggcttatggctataatcccaccaattttggaggcaaagatgagaggataacgaggccagaagtttgagaccagtctgggtatcagagtgagaccctttctttaaaaaactttaaatatttgactggcagagaggcaggtacctttcttcccagctattcaagagggagcagatgtgtgagattcactgcagcccaggagtctgaggtttcagtgaaccatgattgcatccctgcatgtcagcctgggtgacagagcaagaacctatctcaaaagtacagaaaaatcatctcatctacttgtagtcatcatagaaatcaatcattccctccagttatgtccctgacccacaagcttcatttgtgcaagtactggggctgtgctctcagtagtgtgtgccccttcttggaaggatgtccatggcccttgatgatagtgatgcatgtgcatcccacacacaggggtttcctgttctttcatcatttccctctccctttcaacaagtgttgtttctcactggagtgaatgtttaaattcttacatttacaagtcttgttttaattttcagagttgaaaatgaaggcaggtcagtctttcaagaggactctcctgtcctgttaggtcaccctaagaggccctacgcatgacagggattagggtaacacttttacatgtattaactccctattacggagaacatcctacaaagtagaaattcctgataatcctcgttgtcctagggaaaatgagggagagttcaagtagcaaatctaagactgcactgctagtaaaaggcagaatgaggactggaatccaggcatcctggctcctgaacccttgctctaacttatgggtccgccatatcttcaggaatatggggccctgaatgcggtagggttaaagaggagagtccacagagtctgccctttcatctccaacctcctgcaccatgagaatatgttacaggaggggagactgcacctgaccctgcacctctcacttactctcaatactctggcaggtgccatacaaactgcctgtgtctttgtctgttggttcctgcgtgataatcaaagggacaccaatccactcttttatgtgagtactccatggtccaatggaggggttggagaagaagggagaatatttgcgaagatttgaccttacatgtgggtgatgtggaaatgtctagttggcagaatggaggccccatgcaggtgcaggtcttggagaccctccagcaccaggcatgagacccacagcaactgcatgtgggccagccatggggcctacaggaggagaacactcagtgggttggggctgtggctctttatcagggggcatagaattttcgggaatgaacaagtcataggcccaggtcagtgactgtggctcagttttcatctggggatgaggagcacagaatctccctgcctgggggcatgaggagctgaagcatccccacagggacctggccatcagtattatctgggagactttttccctaggtaaatgggggaagggatttgtgtgtgtgtcgagtgtgtgtctgcgcaagggagggacctgcccaacattctgcgtgcttcaccctcagcaatgacccacagctgcaggtggatttctacactgacatggatgaggattcagatattgccttccgtttccgagtgcactttggcaatcatgtggtcatgaacaggcgtgagtttgggatatggatgttggaggagacaacagactacgtgccctttgaggatggcaaacaatttgagctgtgcatctacgtacattacaatgagtatgaggtgagcatcccaggagctcccagcacccaggctctgtgggctcccaaaacaggaggcagctctcattgatctggcctcagtagtccgtcagggtccatctcccataactactcctgcccctggttttcatcacagagcaccccctgcttgcactgccatcctcagctctttcccaaatctgaccaatgtcaaggtcagctcacctgacatttcccccaaagtagataatctcctctgtcttttcacatactgctcatttctacttatgccattatttaaattttcatttagctgagtgaatacaatatacttcaggaaaaaaaagtttaaaaaaaaaaggttgttttaatcagtcacaaattaagtctttgtctcattttggggcccgaattctaccataggaaaaacattaccagagctctgctttcattcaaagaggttttgtttgtttgtttgtttttgtttgtttgttttcttgagatagagtctcatttttcatccaggttggagtgcagtggcatgatatcagctcactgcaacctccacctcctggattcaaacaattctctcgcctcagcctcccaagtagctgggactacaggtgtgtgccagcacacctggctaatttttgtatttttaggggagacgggggttcaccactttggccaggctggtcttgaactccccacctcaagttatctgcccaatttggcctctcaatataatgggattacaggcttaagccaccatgcccagcccttcagaggaaatttttgcttatggaagcatatagatatgtctatgatttcatttgtttttaagcaaatcctggtataagttgctctacacattacgcttcaagaactaagttgatttgttgccaaagaatatatattgaagacattatcaatctgtcgtgctgcttcagtttttaaagattgcataatattgtgttaagaagtttacccaaagttgtggaacttggcccttttgggggcactaaatttccttccagtattttgctctcacaaatgatgtcgtattaagttttctaatcaatccttttgtcattaccaacctcccaatacttgtactagaagataattacaaaaaaatggaaaaactggctcaaaaatgtgtgcattttaaattcgaaaaattaatactaataaggttactttctctatagcctcaatataaagaatacatccatactttctggctttctctaacgagtaggccaaaacattcacatcttattcagattcaagcgagggatcttttcctatgcttagaagtttttgaaggtaatatcctgtttcacaagaacagttctcctttcattctataagaaccctgggtttccttctttgccactaacacctcagatgtaggttactccaaagagaaactgtgccatcagtagtgaaaaacaatcacagttcatggaactgaaaagtatgcattcaacgaacatggtctagcactaaccctgtggcaggtcctgtgcgagatgcagggtctcaagttcctgagacacagtccctggcgatggggatcttccaggttagaagggaggctgagtaagcaaagactttgtgacacagagtatagaacttcgctagaggaatgagtggaaacattagaaataaagtcgggtactgtctcaaataggcacaaaacgtcatctgtaaacataagtgtatctaatacgttaacttgtataactaggaattttcttggggaatgttatttgtaccaggacagagtggagaggaggccgaaaacttgtttggtggcatgctttctttctgatgcatttttcctcttgtagataaaggtcaatggcatacgcatttacggctttgtccatcgaatcccgccatcatttgtgaagatggtgcaagtgtcgagagatatctccctgacctcagtgtgtgtctgcaattgagggagatgatcacactcctcattgttgaggaatccctctttctacctgaccatgggattcccagaacctgctaacagaataatccctgctcacattttcccctacactttgtcattaaaacagcacgaaaactcacatgatttggttcttgctttcagaggggaaaagaggaagttgtcatccccaaggggggccagggcattctatgggaggcatcaggaaatcaaaggggataaaccttcctgtgacaaagggagtgagtgacaaggtccgtggaatgtctgagaagacattagaaacagcatccttctatagcacgtagttgacctcagacagtctgagctaaaatacttacccaatctcaaatgactcaaggcacttaaatgttaggtagctgtttacagccacgcaagtgtacatggtggctttggggaaaatctgtaactcgaggaaaattatgtggaatttcttaatttttttccattgttctcaggatgcttactgtgtatgaacactgtgcccggctttgtgcgggctgctgtgaaggaactgaagaaaaagatgacaagtttgcatgtgaagttttcaatccaagtaatagtttagagaatcactggagcccagtgatttcccttaaagaatcccaattattcttattttcaaatatttgaaaattgcttcattttatgtggggagaatccaggggtttctctttggaaatgaatggtcatgatttgagatcagagaacatatagattattattggaatagatacaagtcacgtacattgacacagtgagcagacccttatttgttgcttttccagtgatgaattgcagcacagcaaacctcacaacacacatcggctaaaagcaatcatttattttgatctctccccgcttcacaggtttactgaacttaagtgagtggtagattatgtgacgggagtcgcgttttctgagagatcttttaggctgggatttcagaggatgctttactcatgtccaactcaacagcaggactgggtgaacacatagaaactgggaagctgtctccttcaatacctcaccttcccatgcatgacattaatttcctaaaatcaggagagtctcatggttctgggacttaataaatggtgattggctttcaccaaagaaagcctttcaaaaggctcatggagaaggtgcacagcatcacaggacttacctttgaatggcagacagtgttacttctaaggttttacattgatcaaggtgagtcatacagacggccctaatcaaaaggagaggactccacaagctgtggttattgtgactgtagtcatgaggggccatccttggcaactagttccactcagaactagttcccacataccgaaaacactaaccatgtaaggaatctcaggctgggcgcggtggctcacgcctgtaatcccagcactttgggaggccgaggcgggcggatcacgaggtcaggagatcgagaccatcccggctaaaacggtgaaaccccgtctctactaaaactacaaaaaatagccgggcgtagtggcgggcgcctgtagtcctagctacttgggaggctgaggcaggagaatggcgtgaacccgggaggcggagcttgcagtgagccgagatcccgccactgcactccagcctgggcgacagagcgagactccatctcaaaaaaaaaaaaaaaaaaaggaatctctgaaggcattacaattgcaaaaacaggctcagagtaaagtgcaatatcttatctgatcaggacaccgtgtctatgatgtgactacaaattatcacttgcaatcccctgcaacatgtgcaccaagggggcacattatctgctttatactaatcaaagaagactgaacgagacaggaaaagtgcaatgaacacatatattttagatgggcaaaaaaaaaaaaaaaaaaaaatagacagcagtcactaatccatatttttgctgaaaccaaccagaaaactatttacattttctctgggaatgtttttctgtagcacttgtccccaccctccattctcagtttcttggagttcctaccaagacggcagaatgacagcccttttcccactataagagctgtgattatctacttcatagcatgtatggaaaaccacttaggagaacagaaacaacatattacctaaaaatccatgaagctagaatgaagagagttccagaaaatagcgtctttgtttgcaaggaccatcttaggtgtcattttgatcattattttctctccccatgttcattgcaacagtttctgcaactccaacctcactcatgggtatgcctctctccttacacttcctttaacctaacttccagacactttgaggtgccaacgcacagtgaatgaaactcttcatgcctctcttccttgtttcattccaggatggaataaaattccctgccctctcactggaaactcttgcgttctgattaggtacactcttctccatacacttatacagtcttgatcacttctcattttgataatggatcatagaccctatcaccagcatggaattcatttctttgggaactatgcagtttgtgctctgagtggatgaaacctatcctggaacccctggcttcctgaacagaagacaacttggagtttatatctacttgctgcttgcctggcgcccattttatgtgaataaccaacaaagtcctaaatttcagccctgctaggcaaacacacagtgactgccctttcttgaatgatattcaccagctcagtgcacttcctatgggccattcgttacattcatctttattcagctactactctgagctcatagtggccaggaatgacatctcagatacaaagagatgacatagagtccagggccaatgttcaactaaaaatttttgaattgcctctggaaacctattcaacatctttcttcatcctgctcaatccaaattcatgatcttctcccagcaaatagggcattgctcaagaagcagaaagccatttctgaactctaaggcctcctcatcttaggtcttttggtcttcccagttattgctgaagcccccaaagaataagtatactctgtgataatattgcccttgaagcccagttccctcagcattgctattcctttgggatgccatctgtgatgctactaaacactggtgtatgttggcctctatttgcaagtgaggggtcaagaagatggaataaaagagaaatttaaaaaattttccccaatttatttatgtttaccatttttatttgaagttcaagtgtacatgtgcaggtttgttatataggttaatcctttgtcatgcgtgttagttgtacagattatttcatcacccaggtaactaaacaaagtacccaatggttattttttctgctcttctctcttttcctacccctccactctcaggtaggccccagtttgtgttgttcccttctttgtgtttatgagttctcatcatttagctcccacctataagtgagaacatgcagtatttttttctggtcctgcattactttgctaaggataatggcctctagctctacctatgttcccgcaaaagacatgaccttgttctttttatggctgcatagtattccatggtgtatatgtaccacattttctgtattcagtcagccattaatgaacatttaggttgattccatgtctttgctattgtgaacagtgctgcaatgaacacttgtgtgcatgtgtctttatggtagaatgatttatattctaatatttatatgtatttttatttcaataatttttgggacccaggaggtttttggttgcatggttacattctttggtggtgatttttgagactttgctgtacccataacctaagcagtgtacactgtacccaatatgtagcattttatctgtcacccctcccacccttccttcgagtctccaaagttcattatatcatcttaatgcctttgcatcctcatggtttagctcccacttatgagtgagaacatacagcatctggttttttattcctgagttgcttcacttagaacaatgacctccagttgcatccaagttgctgcaatggccattatttctttctgcttttatggctgagtagtattccatggtgcatatttaccacatgttctttctccatttattgatccatgggcacttaggtagattccatgccactctaaacatgtgtgtgtatgtctcttttctatataatgacttcttttcttctggataggtacccagcagtggaattactggatcaaatggttgttctgctttcagttcttgaaagaatctccatattcttttccacagtggttgtactagtttacagtcccacaagcagtgtaaaagcattccattttcaccacatccacaccaacatatattcttttttaatgttgtatttatgatcattcttgcaggactaatttggtatctcgttgtgggtttaatttgcatttcactgatgattagagatgttgaacattttttaatatgtttattggctgcttgtatatccttttttgtctccgtactaaaacattattttatttttatgttgtttttgaacctattaattcagtttatttttttccataaattattggggtacaggcggtatttggttacatgaataagttatttattggtgatttgtgagattttggtgcacccatcaaccaagcagtatacactgcattatatttgcagtctcttatccctcacccttccccaacacttcccttcaactccccatagttcattatatcatttttatgccttggtgtcctcatagcttagctcccacatatcaatgagaacatatgatgtttggtttttcattcttgagttacttcacttagaatgatagccttcaaattcatccagatcactgcaaatgctgtgaatttattcctttttatggctgcatagtattctgttatgtgtgtgtgtatatatatataccacagtttctttatccactcgttgaatgatgggcatttgtgttggttccatgattttgctactataaattgtgtcacagtaaacatgggtgtgcaaggatcctttttgaatattgacttcttttcctctgggtagatacccagtagtgggattgctggatcaaattgtagttctactttttgttctttaaagaatctccacactgtcctccatagcaactatacttatttacattcccaccatcagtatagaagtgttccctcatcaccgcatccatgtcaaatctactgttttttgtttgtttggctggttggttggttgaaaagttggttggttggttgtttattatggccattcttgcaggagtgaggtgttatcacattgtggttttgatttgcatttctatcatgattagtgatgttgagcattttttcatgtgttgtttgtccaattgtatatcttctcttgagaattctctattcatgtctttagcccatttttcaatggaattgtttgtatttttcttgctgatttgtttgagttctttgtaaattctggatattagtcttttgtcgatgcatagttgtgaatattttttccccactctgtgagtggtctgtttactctgctgattatttcttttactgtacagaagattttagttaggtctcatttatttatttttgttgcatttgcttttgggttcttaatcatgaattctttgcctaagcgtctagaagagtttttcaaatgttatcttcttgaatttgaatggctccacatcttagattcaagtctttgatccaccttgagttgatttttttataagatgagatgagaatccagtttcattcttctacatgtggcttgtcagtgttcccagcaccattcattgagtgcggtgttcttcccccactgatatggtttggatctgtgtcctctccctaatcttacatcaaattgtaatctccaacgttggaggagggacagtgaggtccaggctgatgaggtctcaggtggggataaagaacttattggaagttggaataagggtcactcttaccatgctttagcaaagagactggtagcattttgtccctgctctatagatctgtggaacttcaaacttgagaaaggtgattaagggcatctggcagaagacatttctaagcagcaaagcattcaaaagtagcttgacagcttctaacattgtatggtcatatgcatgaaaaaagagatgatctgaaactggaacttatatttaaaaggggagcagagcataaaagtttggaaaatttgtagcaagatcatgtggtagaaaagaaaaattcattttctggggaggaattttcaagtttgctgcaaacatttgcataagtaaagaggagccaaaacaacaaatgcctcaaaggcatttgttgatcttcacggcagcccctcccatcataggcccagaggcccaggaggaaagaatggttctgtgggctgggcccagggccctactgccctgcacaatcttgggacactgctccctgagtcccaactgctccagcttcagccgtggctaaaagtgtgccaaacatgtctcaggctgctacttcaaagggtgcaagtcataagccttgaaaacttccatgtgattttaagcttgtggtgcactgaaggcaagatctgaggcatgggagcttctgcctaaatttcagaggatgtatgggaaagcctggatgtccaggcacaaatctgctgcaggggcagagaccttacaaagaacctctactagggaagtgcataggggttgagcccccacacaagaccacactggggtactgcctagtggagctgtgataagagggctaccatcctccagaccccagaatggtagatccactgacagctcacaccatgtgctgggaaaagctgcaggcactcaatgctagcctgtgaaaacacccatgagagctctaccctgcaaagccacataggcagagctgcccaaggcctggaagaccacccttggcatcagtgttggctggatgtgagatatggactcaaaaaagattatttttgagctgtaagatttaatgactgccatgctgggtttcagacttgcaggggcttggagcccttttgttttggcagatatttcccttttggaaaggaagtatttacccattgcttatacctccattgtatcttggaagtaattaccttgttttttattttacaggctcataggttgaagggatttgcattgtctcagatgagactttggactttaggcttttgaattaatgctgaaatgagttaagactttggggaactgttgggaaggcatgattatattttgcaatgtgagaaagacatgagatttgggaaaggccaagggtagaaatgaatgatttgggtctgtttccctgttcaaatctcacaacaaattgtaatcctcaaggttggaggaaggtagtagggggaggtgattggatcatgagggtggatttcccttttgctgttctcatgacagtgagtgaattctcaaagatctggtcatttaaaagtgtgtaacacctctttctttgttctctctttctcctaccatgtaagacatgccagcctcctctttgccttctgcataattgtaagcttcttgaggcctccccaacaatgcttcttatacagactgtggagttgctagccaattaaacctattttatttataaattattcattgtcaggtatttctttatagcagtgcaagaatggactgatacatccacttcaagcttttgtatgctttgttgaagatccattggctgtaagtatttggctttatttctgggctctctattctgttattggactacatgcctaatttttttttaccagtacctgctgttctgttaactattgccttgtagtttaatttgaagttgggtaatgtcacacctccagatttgttctttttgctttgttattgctttctctatgtgggctctcttttgattttgtataaattttaggatttttttttgaagttctttgaaggatgatgatggtattttgatgggaattgcattgaaactttagattgcattgggcaatatggtcattttcacaatatttattttacccaatcatgagcattgggtgtgttttcatttgtctgtgtcatctatgattttagagacgagctctggctctgtggtccaggttggaataaagtggtgtgatcatggctgtctgcaacctcaaactcctgggctcaagtgactcttctgccttggcctccaaaagccctgggattacagtcatgagccaccacacctaaacccatggaccattgttttttaaaagaaaaacaagttcattaaccctaagggtagcctccaggagttaggatatggcgttaaccaattaatagtgacttatgcatggaggaagaaaggaaaattaggaagacaaatctcttataattttcatcatacaatcttggttacaaacccagtcggtagaatgcagtcaatgacctgctgacatgggggtacaaaaggccacccttttacctcaaagagcaactctgctgtgcagttcacactccagtgcttcttcctgaaataagactaagctacatctagctgttccaattctgttccaactaagcagccactctctaaccactgacaatccctaatctgttcttctatctctatgatttgcatatcctggacatttcatgtaaatgaaatcatacaattggatttttgtgtctggcttttttccacttaaaacattaaacacataatgttttcaaggttcatttatgttgtagcatgtatcagtattccttctttttgtagctgaataatattccattttgtgaagatatcacaatttgtttatcctttcagcagttgatggacaattgggttgtttctactctttgactattgtgaatagtgatcctatgaacatttatgtacaagtttttgtttgaacacctgtatccaagccaagaagttgaattgttaggtcatattatacttttatgtttaactcattaaggaaccacaaaactattttccacaaaagtgatgccattttacatttctgtcaccaatgcactagagttctaaaaattttctgcatcctcaccaactcttgtttttcctttttaaaattataaccatcctagtgggtgtgaagtagtatctcatcgattattttgtgtgtgtgtaattttatttattaattgtttaattttttattttcatacatttttggggaacaggtgatatttggttacatgagtcagttctttagtggtgatttgtgagactttggcacacccaccacccaagcagtatacactgaacccaatttgtagtgttttatccctcaccttcttcccacactttctccttgagtttccaactttcattgtaccattcatatgcctttgtttcctcataatttagctcccacttatgcgtgagaacaaacaatgtgtggtttttcattcctgacttacttcacttagaataatagtctcctatctcgtccagattgctgcatatgcaattaactcattcctttttctggctgagtagtattccattatatatatcacagtttctttatccattcattgatgagtatttcagctggttccacatttttgcaattgtgaattgtgctgctataaacatgcgtgtgcaactatcttttttgtataatgacttcttttcctctcagaagatacccagtagagggattgttggatcaaattatagttctacttttaattcctgaaggagtcttcacattgatttccatagtggttgtactactttacatttccaccagcaatgtagaaggtccgttttcactgcatccacaccaacatcttttattttttggttattttattgtggcctttcttactggagtaaggtggtatcgcattgtggttttgatttgcatttccctgatcattagtgatgttaagcaggctttcatatgtctgttggccatttgtatatcttcttatgagaattatctgttcattttcttagaccacgttttgataggattgtttgtttttttcttgctaatttgtttgggtttgttgtaaattctggatattagtcctttgttgaacatatagattgtgaaaattttctcctactctgttggttgtctgtttattccgctgagtgttccatttgctatgcaaaatgcttttctttaattaagcctcatctatatatttttgtttttgttgcatttgtctttgggttcttggtaatgaaatctttgtgtgcagactcaacaggcagggaggcatgaaaaccttgcttgctttcttagatggaaggctgttagcctgggacaagttctcagcccttgtcacccactgcctggaaacaaactcagtgctgttggggacagcacaacgggagtgagaccagccttttgggttgcaggggagatggaggaggcctgtaactgccagctttcccccacttagatgacaacctgtatgatacagcagaggcagccataattcttctgggaaaataacaccactcatctcagaaccacaccctgaacccccaccacagccacagcaagccccacccaaggagcccaaagaggatctgtgctcagacatgcctaacactgtccccatctgatggtcctttctgacccactttggtagctgaagatagatgtcctatttttgatttgcatttccttcatgactaatgacattaaataccttcttgtgtgcttgatggccatttgtatatgtttttgcagacatgtcatttgctcatttttaaattgggttgcttttctttttgctgtttagttgtgaaagttcttcatatattctgaatactagacacttaccaagtgtatgatttgccaatacatattttccattctgcaggttatcttttccctcactttatagtgtttttaatgcataaaaatttttattttaatgtggccaaatttattatttttttttattactcgtgcctctggtatcatgttgaagaaaccattgccaaatccaagatcaggaagattcattcttatatttactgtgagtatttggcagttttatctcttacatttgggttgttgacacattttgagttaatttttttcaattataatttaagttctggggtacatgtgcagaacattcagttttcttacataggtatacatgtgccatggtggtttgctgcacccatcaacctgtcacctgcattaggtatttttcctaatgctacccttcccctagcccaccactccctgacaggtcccagtgtatgatgttcccctccctgagtccatgtgttctcattgttcagctctcacttataagtgagattatgtggtgtttggttttctgttcctgtgttagtttgatgagaatgatggtttccagcttaatccatgaacttgcaaaggatgtgaactcatcctttttgtatggctgcatagtattccatggcatatatgtgccacattttctttatccagtctatcattgatgggcatttgggttggttccaagtctttgctattgtgaatagtgccataataaacatacatgtgcatgtgtctttatagtagcatgatttataatcctttgggtatatacccagtaatgggatcgctgggtcaaatggtatttctagttctagatccttgaggaatcaccacaccatcttccagaatggttgaactaatttacactcccaccaaccgtgtaaaagctttcctatttctccacatcctctccagcatctgttgtttcctgacttatggatgatcaccactctaactagcgtgaggtggtatctcactgtggttttgatttgcatttctctaatgaccagtgatgatgaggtttttttcatatgtttgttggctgcatgaatatcttctttccagaagtgtgtgttcatgtcttttgcccaatttatgacgggattgtttgtttttttcttgtaaatttgtttgagttctttgtagattctggatattagccctttgtcagatggatagattgcaaaaattttctcccattctgtaggttgcctgttaactctatgatagtttcttttgctgtgcagaagctctttagtttagttagatcctatttgtcaattttggcttttgttgctattgcttttggtgttttagtcataaagtctttgcccatgcctatgtcctaaattgtattgcctaggttttcttctagaatttttatggttttaggtcttacgtttaagtctttaatccatcttgagttaatttttgtataaagtgtaaggaaggggccaatttcagttttctgcatatggctagccagctttcccaacaccacttgttaaataaggaaacctttggtaccagtaccatgctgttttttgtttgtttgtttgtttactgtagccttgtaatatagtttgaagtcaggtagcttgatgccctcagctttgctcattttgcttgggattgtcttggctattaaggctcttttttagttccatataatgtttaaagtagttttttccaattctgtgaagaaagtcaacggtagcttgatggggatagcattgaatctattaaattactttgggcagtatgacctttttcacaatattgattcttcctattcataaacatggaatgtttttcgatttgtttgtgtcctctcttattgccttgagccgtggtttgtagttctccttgaagaggtccttcacattccctgtaagttgtattcctcagtattttattctcttgatagcaattgtgaatgggagttcactcatgatttggctctctgtttgtctgttattggtgtataggaatggttgtgatttttgcacattgattttgtatcctgagactttgctgaagttgcttatcaacttaaggagattttgggctgagaaagtggggtttttaaatatacaatcatgtcatctgcaaacagagaaaatttgacttcctctttttctatttgaatatcatttatttctttctcttgcctgattaccctggccagaacttccaatactatgctgaataggagtggtgagagagggcatccttgtcttgtgctggttttcagaaggaatgcttccagtttttgcccattcagtatgatattggctgtgggtttgtcataaataacttattattttgagagatgttccatcaatacctagtttattgagagtttttagcataaagggatgttgaattttgtcgaaggtcttttctgcgtctgttgagataattgtgtggtttttgtcattgattctgtttatgtgatggattacgtttattcatgtgcgtatgttgaaccagccttgcatcccatgtatgaagctgacttgatggtggtgtataagctttttgatatgctgctggatttggtttgccagtattttattgaggattttcacatcgatattcatcagggatattggcctgaaattttctttttttgttgtgtctctgccaggttttggtatcaggaagatgctggcctcataaaacgagttagggaggattctctctttttctattgtttgcaatagtttcagagggaatggtgccagctctgctttgtacctctggtagaatttggctgtgaattcatctgcttctggactttttttggctggtagtctattaattactgcctcaatttcagaacttgttatcggtgtattcagggatttcacttcttcaaggtttagacttgggagggtgtatgtgtccagaaatttatccatttcttgtatatttgctagtttatttgcatagaggtgtttatagtattctctgatggtaggttgtatttctgtgagatcagtggtgctgtcctctttatcatttttattgcatttatttgattcttctctcttttcatttttattagtctggctagcggtctattttgttgatcttttcaaaaaatcagctcttgggttcattgatggttagaaaggtttttcgtgtctctatttccttcagttctgctctgatcttagttatttcttgtcttctgctagcttttgaatttgtttgctcttgcttctctagttcttttaattttgatgttagattgtcgattttagatctttcctgctttcccttgtgggcatttagtgctataaatttccctctccacactgctttaaatgtgtcccagagattctgctatgttgtgtctttgttctcatttggttcaaagaatatctttatttctgccttaattttattatttacccagtagtcattcaggagcaggttgttcagtttccatgtagttgtgtgattttgagtgagtttcttaatcctgagttctaatatgatagcactgtggactgagagatgtttgttatgatttccattcttttgcatatgctgaggagtgttttacttccaattatgtggtcagttttagaataagggcgatgaggtgctgagaagaatgtatattctgttgatttggggtggagagttctgtagatgtctattagggccgcttggtccagagctgagttcaattcctgaatatctttgttaattttctgtctctttgatctgcctaatattgacagtggggtgttaaagtctgccactattattgtgtgggagtcagagtctctttttaggtctctaagaacttgctttatgaatctgggtgctcctgtattgggtgcatatatatttaggatagttagctcttcctgttgcatttttccctttatcattatgtaatgcccttctttgtctcttttgatctttgttggcttaaagtccattttatcagagaccaggattgcaaattccgctttttttttttttttttgctttccagttgcttggtaaatattcctccatccctttattttgagcctacatgtgtctttgtatgtgagatgggtctcctgaataccgatgggtcttggctcttaatccaatttgcctgtctgtgtattttaattggggcatttacctcatttacatttaaggttaatattattatgtgttaatttgatcctgtcattatgatgctagctgattattttgcccattagttgatgcagtttattcatagtgttgatggtctttacaatttggtatatttttgcagtggctggtaccagttattctttccaagcttaatgcttctttcatgagctcttgtaaggcaggcctggtggtgacaaaatctctcaacatttgcttgtctgtaaaagattttatttctccttcacttatgaagtgtagtttggctggatatgaaattctgggttgaaaattcttctatttaagaatgttgaatattggcacccactcttttctggtttgtagggtttctgctgagaaatccactgttagtctgatgggcttccatttgtgggtaacccagcctttctctctggccgcccttaatattttttccttcatttcaaccttggtgagtctgacaattatgtgtcttggggttgctcttcttgaggagtttctttgtggtgttctctgtatttcctgaatttgaatgttggcctgtcttgctaaattggggaaactctcctggataatatcctaaagagtgttttccaacttggttccattctcctcatcacttttcaggtacaccaatcaaatgtagatttggtcttttcacataatcccaaatttttggaggctttcttcattccttttcattctttttctccaatcttgtcttctcacttcatttcataaagttgatcttcagttgctgatatcctttcttccactcaattgatgaggctattaatacttgtttatgcttcatgaagttttcatgctgtgtttttcagctccatcgggtcatctatgttcttctctaaactggttattctagttagcaattatctagccttttctcaaggttcttagcttccttacattgggttagaacatgctcctttagctcagaggagttattaccaaccttctgaagcctacttctgtcaactcgtcaaactcgttctctgaccagttttgttctctggctggtgaggggttgtgatcctttggaggagaagaggtgttcttgtattttgaattttaagcctttttgtgctggtttctccccatcttcatggaattatctaccttggtctttgatgttggtgaccttcaggtggggtctctaacggtcagtcccctctgctgcaggtatgatggagtttgctcgaggtccactccagagcctgtttgcctgggtatcaccagtggaggctgcagaacagcaaagattgttgcctgttctttcctctggatgctttgtcccagaaaggcccctgccagatgtcagccagagatctcctgtatgaggtgtcactgagaggtgtcttgcagtcaggaggcacaggggtcagggacccacttgagtaggcagtctgacccttggcagagcttgaaccctgtgctgggaggtctgctgccctcttcagagccatcaggcagggtcgtttaagtctgctgaagctgcacccacagctgcccattcccccaggtgctctgtccaagggagatgggggttttatctataaatccttgcctggggctgctgccttttttttagagatacccttctgcagtggccttgctgagctgtggtgggctctgcccatttcgaacttcccggtggctttgtttaccctgtcagtggaaaaccacctactcaagcctcagcaatggcagacgcccctccccccaccaagctcgagtgtcccaggttgagctcagactgggagaatttcaagccagtggatcttagtttgctgggctccatgggggtgggacccgccaaaccagaccacttggctccctggcttcagtcccctttacaggggagtgaatggttctgtctcactggcattccaggcaccactgggttatggcaaaaaaaaaaacaaaaaacaaaaaacaaaaaacaacttctgcttttgtgcttgaaacccagggccctggtggtataggtaccggaggtaatctcctggtctgcgggttgcgaagacagggaaaagcacagtatctgtgcggagctcttcattcctcaggcacagtccctcacagcttcccttgggtaggggggataatcccccaaccccttgcacttcctgcgtgaggcgatgccccaccctgcttcagctcgcccttcatgggctgcacccactgtccagtagcgatgagatgaaccgggtacacattttgagttaatttttgtgtatggtataaggtgagggttcagcttcattgttttacatgtactgaatatacattcagtacaacaaacctccttgacctgtataacaagcctgcacatcctgcacatgtacccctgaacttaaagcttaaaagctaaaaacaaacaaacaaacaaaaccaacaaggctgggagctgtggctcacgcctgtaatcccagcactttgggaggccgaggcgggtggatcacgaggtcaggagatcgagaccatcctggctaacatggtgaaacccccgctctgctaaaaatacaaaaaaaaattagccgggcatggtggcgggcgcctgtagtcccagctactcaggaggctgaggcaggacaatggcgtgattccgggaggcagagtttgcagtgagcagagatcacgccactgcactccagcctgggcacagagtaagactccctttcaaaaaaagaaaagaaaagaaaagaaaaccaacaaaacaaaaataatttattcaagagacaattccttcccacattgaatgatcttggcacccttgttgaaatcaatttacaatggatgtttaggtttatttctggactctcaattctgttccattgatctataagtttacctttaagccaatatcaatgtattttgattactgtagtttcattatcacagcattaactttgacatctgggatttgttgagaccatgcagtcagcttcctttgcagatatgccatgttttttgaaattacatcctccatatgagtttcagcactcagtactctcttccctgtgcttgcaggatgtgagggtttctttaaatgctatcaccaggaacatctagtgttcaaaatgtgccttgaattggtagttggtgggcactaatgtgtccctctttttctttccttctttctttcattctttctttttttaaaaagaatttcaatgcagttaaaaccaaagcaagtacttccacaatcctgtgattaccattgtacccctacaattctagtgccacagctactgaagtcattcgccttctctcagcactttctgtcaataaagcacaggtgactattcttagtagttgtgatactaataattgtaatacaaagcaatatttagtaactgtgatacttactatgtcatgggtaatcactatgtcacttaccagcaatggatctttactgtgatctgcccaataagagatttaggctcccataataaggatccagcttctttctatgacttttttctggcctaaagttggtttccacccttctccatcaaatatgaaatgtttcttagtactctctgcccagaagatgaaaggaagtatttatccatctgcccccatccccagttgttaaaaagtcatcctgttggcattaagtctcccacaactttggtttgcagatgcatgggtgctgagaggatttctgcaagagtcctattctaccatctcaaaggagcccagtgctggaaagaggaaggtactggaaagataaatactaaggagaggcactgtcagtgtgcacctgcatgaagctagtgaaaaactgtctagacctggtcaacttagtaatggctggatgaagaggtggggctgagaggatatcatgtggtacaggaaaagcctgatatactgacctcctttcaatttctcatacacaccaagctcattttcatttttggagcatcttatatgacaaattcaaaaagcgtcaaaaatatcataacaaggcagggagaatgttctagtttaaaagagactaaaaaagcgtagcaacagagttcatgaaacctgattgagtgatggattttaaaacagctataaaggacatgcttttgtacaattggggaaattaaaatagtatcgtaaattagaagttgattcttaggtggtggtagaatagaacttctatcagtcttgtggatctgaagatacagaaattgtacgttggtgcccgccaagtggaagagagagttaggctttcagttggaaccctgaaagggatataccccagagcggggttccccaactcacaagccacagaccaataacaatctgtgacctgataggaatggagccacacagcaggaggtgagcatcaggtaagcattaccccatgagtggccttatgacagatcagccaggcattagattctcataggagcacgaattagaatttcactaccagaattccacattacgggtgccacagtgtgtagttttattgcaaatagtagcatgactataacaattgccacaagagtggtgtagtaaaaaaaattatttaaaacttacttgcccaacgtaaaacatttccctttggggatttacagagttacaatagcagtttcatgtataattaaaatttcctgcaaatacgaattaaaaataagttttattatttggtggcaaattttgagagtaaagtgtggaaatgacaaatattatctgttgaagtaaatgtgggactgagtaagataagtagcctttagttacttaatttttgtgatttttagcttatgattttttatttttccacaactgatgttctggacaattctctgggctgttaggggttgctccctcagctttttaggctttgacttgaggtgatgtatttaggagttgattcctgtaacttttgcttctaagagcgttgaaataagaacaatgtagggcccttcccagcttggcttaaggaagaagagagaaagactaaatttcctgggttagatagaggtggttttatttctttggacttttctagttgtgttaatggcttgaggcttccttgcctctggcttagctggctgatcagctaatttatttcctttggctaccttatttattctcttttgatgttccctacaatgcatccctgctatttcgtgtgtaagaaaaagtaaggataataacctgttaatttcctggtgatattttatgggagattcattagtggtaagaaaatgcctttccttttaaatggcagcatgagcatggacaattaggaaagcatacttggagttagtataaatgttagctaccatttccttgcttaacttaagtgctcttgtaagagctattagctcagctaattgagtgcttgtgtttggggagagtgactactgcttatcctgtcttatgtacttcttgctttacaggctgtttattagctaagagctccccttagaggacagtgatcctgccacattatgtgggctgtaaacagttgaattatttcctagggttaacttggaggcttttctgactagtagagctaatatgacaatgacttggaagcacgtgtaaataggtctttctaactacaggtaaggtggagaaaactattggattcgagtttttcctgagatgccctttactgttgtgctatctttttttttaattattatactttaagttttagggtacatgtgcacaatgtgcaggttagttacatatgtatacatgtgccatgctggtgtgctgcacccattaactcgtcatttaacgttaggtatatctcctaatgctatccctcccgcctccccccaccccacaacagtccccagagtgtgatgttccccttcctgtgtccatgtgttctcattgttcaattcccatctacgagtgagaacatgcggtgtttggttttttgtccttctgatagtttactgagaatgatgatttccaatttcatccatgtccctacaaaggacacgaactcatcgctttttatggctgcatagtattccatggtgtatatgtgccacattttcttaatccagtctataattgttggacatttgggttagttccaagtctttgctattgtgaatagtgccgcaataaacatacgtgtgcatatgtctttatagcagcatgatttatagtcctttgggtatatacccagtaatgggatggctgggtcaaatggtatttctagttctagatccctgaggaatcgccacactgacttccacaatggttgaactagtttacagtcccaccaacagtgtaaaagtgttcctatttctccacatcctctccagcacctgttgtttcctgactttttaatgattgccattctaactggtgtgggatggtatctcattgtggttttgatttgcctttctctgatggccagtgatggtgagcattttttcatgtgtctctttggctgcataaatgtcttcttttgagaagtgtctgttcatgtcctttgcccaccttttgatggggttgtttgttttttccttgtaaatttgtttgagttcattgtagattctggatattagccctttgtcagatgagtaggttgcgaaaattttctcgcattctgtaggttgcctgttcactctgatggtagtttcttttgctgtgcagaagctctttagtttaattagatccatttgtcaattttggcttttgttgccattgcttttggtgttttagacatgaagtccttgcccatgcctatgtcctgaatggtaatgcctaggttttcttctagggtttttatggttttaggtctaacgtttaagtctttaatccgtcttgaattaatttttgtataaggtgtaaggaagggatccagtttcagcttcctacatatggctagccagttttcccagcaccatttattaaatagggaatcctttccccattgcttgtttttctcaggtttgtcaaagatcagatagttgtagatatgcggcgttatttctgagggctctgttctgttccattgatctatatctctattttggtaccagtaccatgctgttttggttactgtagccttgtagtatagtttgaagtcaggtagtgtgatgactccagctttgttcttttggcttaggactgacttggcgatgcgggctcttttttggttccatatgaacttgaaagtagttttttccaattctgtgaagaaagtcattggtagcttgatggggatggcattgaatctataaattaccttgggcagtatggccatttttgcaatattgattcttcctacccatgagcatgtttgtgctatcataaaggggaggtctggattagagagaagaaaagagagagatgggctctagtgtttaggaggaggtttactttcctacccttaatttccagaattatccagggctcctgtgctataagggcaatctgagcccctggagctaaggtttaagccctgggacccatcagtcctgctgaaccatctgtgagactggttttgaacccagtgacctctgcctctgggggcagttctgtttccagtggttttgccacagcccagacagggttgaggttgcttcatcttgctgcctgggcatttcttttaaaaatgccctggcctgccatgccaataggaactagcagatgcactttggggattctggactttacaagcttgtaaagctgctgctgaagcctctgttgttctcctgaaattttcccctttttgggggactcttcctggtacctattataaaagaaaaaagtcaccaccttcaggaggttctcttaggtgctacttcgtcctatagcttgtttttgtagttttcttttaatattgggaactacctgtgtaataaacttctttttcagaatgagctgttcctccactgaattagggaataaggaggtgtactctattagtgcctctcttggcctttccataaaggctacagaattcttatctggcttttggttcattatagagagtttcgagtaactgagaggtttggccctggtttttcataggtctcttaaaatgcgtttaaaaattggtttctttttcattcatttcctgagctattggggttttagttagggttatttaccagaactgctttcctccctattgggaatgatttttttttttggtttggtgttttttttttaagtgataaaaatattttatttaaatggtacagaagaaattatgtgtacttaaaaatgattaaaaattcatgttaggaaatgctaaaaacccaataatttacacaatgataaaatctaaaatgatgagaaaacatgaaatgctttcgtttggtcctctgacctaacaaaactattaagaacatgagatatagtaattactgaagttgggttaaaagcacaagacaacataattcctttatatacatccagccattttatacaagaaactgttataccttaaatggaagagtgaagaatttgtttaaaatattgagagtgcattatgcacctataatgaaaccactttctccaaagattcaaacagattaacattgcaaaatggtatttctatataacaccaacttctgaaaaatttaataattcatttaagaatatgcaagtgaaatgtagtttattctgatttcaacaacggatattcaaagtcacaatttttcccaagaaatcattcactttatactttcaaaaacacattgtagcttttctgttaccagtcagccatgttttcaactagctgcatgtttaatcattcacttcaaatttacatgtccagcccagcacagtggcgtgggcctgtagtcccaactacttcagaggctgaggcaggaggatcgcttgatcccaggagttcaaagccagcccagtcaacatagcaagaccctgtgtcttcagaaatcatccaaggagtgagataaacattacaacccacatatactgggtaaacaacaagggaatgaaaaatgacctcacatgccctaaagcaatgttgacgcaaactcctgatgcaataagggcagcagttgtaatgggtacctggaatggtatcgtggaattggagaacttatttttgtaatgaaaggaaagctagcttgaaagaaatgtttttgaggttttctcttgtttttctcctttttgtttggttcaggtttgaaatttagattggcttgggttaaatttgggtaggcaaaaaaatattatctttaagggaattaatatttatcaaatattctcttttttcatgtaaaccccaatgaatgatatgaaatttgaagaaataggagagagcaagaaccatagaatgaagtcagaaaaaccctgctcttctttaaaatagagaggctaattttaaaatgttgagtttaggacctggaatgcgaaacatctcaaattagcactttgaacgctttctcctcccaagcccgtcgcattcctttctttatcttcatgttaaggctgggtggaaggttcatcaattcccggatatgatccaaaatagacttagatttgtacctatgagaatcaatgatcttagcagtacgtgacttatatccaattctcagaacttaatgcttaccattgtaacattatgataataaaacactggcagatataaagtcatgtcatttattttagtcatattgaatctcttagaataaattatttattttttagaaaatatcttttagagtaaaatttacataaatcaaatgtattcctgttataattttaaatgaacatccatctacccccaatgctttaagtattagagagtagacttgacgtccatctaagactcctttcagctttacataaggtctcattactatgatgcattggatcctcttgttctctgttttcttcaggaaatcatgctcacagaggttaggtaaattggtcagggtaacacagtaatggctgcactacatttaaactgcagctttttaaatccatgtttaatactttttctcaacacctcccaattgcctcacattatttcagattcttctttgggaccccttgaattcaccctatgtagcacctcccttggcaaaaaaaaaaaaaagttaacaaaatatgctttcttaataggcaaaaagggggatgtatatttcttcaaataactaaaaaaggggagtccatatttattaagtgaaaagaacaagtgcaatcacattagcttgaaagggaaataagtgattacatgatatacttggactgttggacaggaacagataggggacttttccgtgagttatttattttggtcttttatttaaagcagccctaatttttagattgtttgaataacagacaaattagaagctcagcaaatttcttagtggacaattttaactttccaaaaaatatccttgcatttccgctaccttctttaaaaatgaaacctatccctcttcaggacactggtcccaagacagatcatctagaagtacccaaatacctccaaacagatcaggaccaattcaactatttctagaaaaaaaaaaaaacaaagtctgtgcttcatattggatgcccacaatatgttctccctgctcttctagattacttattttccttttttttattattattatactttaagttctagggtacatgtgcacaacgagcaggtttgttacataggcatacatgtgccatgttggttgcctgcacccattaactcatcattttcattaggtgtttctcttaatgctatccctcccccatccctccaccccatgacaggccccagtatgtgatgttccccggcctgtgtccaagtgctctcattgttcaatttgcacctatgggcgagaatatgcggtgtctagttttctttccttgtgatagtttgctcagaatcatggtttccagcttcatccatctccctgcaaaagacatgaactcatcattttttagggctgcatagcattccatgatgtatatgttccacattttcttaatccagtctatcattgatggacatttgggttggttccaagtctttgctattgtgaatagtgctgcaataaacatacatgtgcatgtgtctttatagtagcatgattaataatcctttccgtatatacccactaataggatcgctgcgtcaaatggtatttctagttctagatccttgaggaatcgccacactgtcttccacaatggttgaactagtttccactcccaccaacagtgtaaaagtgttcctatttctccacatcgtctccagcatctgttgtttcctgactttttaatgattgccattctaactggtgtgagatggtatctcattgtggttttgatttgcattcctctgatgaccagtgatgatgagcattttttcatgtgtctgttggctgcataaatgtcttttctgagaagtgtctgttcatatccattgcccactttttgatggggttgtttgattttttcttgtaaatttgtttaagttatttgtagattctggatattagccctgtgtcacaagggtagattgcaaaaattttctcccattctgtaggttgcctgttcactctgatggtagtttcttttgttattcagaagctctttagtttaattagatccatttgtcaattatggcttttgttgccattgcttttagtgttttagtcatgaagtccttgcccatgcctatatcctaaaaggtattgcctaggtcttcctctatggttttagatctaacatttaagtctttaatccatcttgaattaagttttgtgtaaggtgtaaggaagggatccagtttcagctttctatatatgactagtcagttttcccagcaccatttattaaatagggaatcctttccccatttcttgtttttgtcaggtttgtcaaagatcagatggttgtagatgtgtggtgttatttctgaggcctctgttctgttccattggtctatctctctgttttggtaccagtaccatgctgttttggttactgtagccttgtagtatactttgaagtcaggtagcatgatgcctccagctttgttcctttggcttaggaatgacttggtaatgcgggctcttttttggttccatatgaactttaaagtagttttttccaattctgtgaagaaagtcattggtagcttgatggggatggcatttaatctataaattaccttgggcagtatggccattttcatatttattcttcctatccatgagcattgaatgttcttccatttgtttgtgtcctcttttatttcattgagcagtggtttgcagtgctcagtaagttggattcctaggtattttattctctttgtaacaattgtgaatgggagttcacacgtggcttggatctctgtttttctgttattggtgtatgggaatgcttgtgatttttgcacattgattttgtatcctgagactttgctgaagttgcttatcagcttaaggagattttgggctgagtcgatggggatttctaaataaacaatcatgtcatctgcaaacagggacaatttgacttcctcttttcctaacttaataccctttatttctttgtcttgcctgattgccctggccagaacttccaatactatgttgaataggagtggtgagagagggcctctctgtcttgtgccagttttcaaagggaatgcttccagtttttgcccattcagtatgatattggctgtgggtttgtcataaatagcttttattatttgagatacgttccatcaatacctagtttattgagagtttttagcaggaagcactgtggaattctgtcaaaggccttttctgcatctattgagataatcatgtgatttttgtcactggttctctttatgtgatggattacgtttattgatgtgcatatgttgaaccagccgggcatcctagggatgaagccaacttgatcttggtggataagcttcttgatgtgctgctggatttggtttgccagtattttattgaggatttttgcatcaatgctcatcagggatattggtctaaaattctctttttttgttgtgtctctgccaggctttggtatcaggatgatgctggcctcataaaatgagttagggaggattccctctttttctattgattggaatagtttcagaaggaatggtaccagctcctctttgtacctctggtagaattcggctgtgactccatctggtcctggactttttttggttggtaggctattaattattgcctcaatttcagagcctattattggtctatacagagattcaaattctttctggtttagtcttggaggggtgtaagtatccaggaatttatccatttcttctagattttctagtttctttgcatagaggtatttacagtattctctgatggtagtttgtatttctgtgggatcggtggtaatatcccctttatcattttttattgcatctattttgttcttctcccttttattctttattagtcctgctagcggtctatcaattatgttgatcttttcaaaaaaccagctcctggattcattgattttttgaagggctttttgtgtctctatctccttcaattctgctctgatcttagttatttcttgccttcttctagcttttgaatttgtttgctctttcttctccagttcttttaattttgatgatagggggtcgattttaggtctttccagctttctcctgtgggcgtctaatgctataaatttccctctaaacactgctttagctgtgtcccagagattctggtatgtggtgtgtttgttctcattggtttcaaagaatttatttatttctgccgaattttgttatttacccagtagtcatttagttttacattttgaaacacccaaacaactgtcactggattgcttgcaacagaaaggataaatgctttatgggatggatgctgcattctccatgatgtgattatttgcatgcttgtatcatatcttatgttcctcataaatgtatacacctactatgtacccacaaaaaataaaaataaatgacaggcaaacgaccaatatgcacatgaaaagatacccaacatcatgagtcgttagggaaatgaaagtcaaaagtatcatgagataccacttcacattcattaggacggctattacttaaaaaatgaaaactgacaggtgtgaggatgtggataaactgcaacccttgaacattgctgtttggagtgtaagatggtgtgattgctgtggaaaatattatggcagttcctcagaaaggttactcatcataatatacatctctttagcaactgggatacattttttctatcaatggtttaaattcactggcaataaaactgaagagaaaaatgaagtaagagggagaaagaaacaagggagaaaggaaattcgaattcacttgacctttaaattctaatatatgttttaaggctgcttcctttcatcatgaacagagaacttgagtcctccacaccagttgaagaaaactgcattgtgactgaagtccaatcacctgtacctcacacagtctggaaataaggaacacacaaatcaagaactagacaagaaattcaactttctccacaaatcttcttgggaaagagtgtctctgaaaattttgatacccttggacactcagaaaagaaaagggtggagttagagcccagctgtgtgagaggcagatgggaactggcctcacctggcaaagccaagggaaccagtgtgagaccaggggggacacaagggctttctctacctccttccataggtcctgtttaggatcaagaccattgttctcccagaacctctataggcaaaaagaaggattaccttccgttgccaataatttccaccagaatcctcactatttttaccattgtacaaattaggaaaatgcacacattcttggtagattctgcacagtggagagaaagcttaaagagaggcatggaggctggactttacaacccctcaacctcactccatcatccttatctgtgcatttccctggtgacctctttttcctcctggtgcctcccccactgtcatttctgctgcatcacagacacagacttgcaagcaagtgtggttgtgactgagtctatttctgacaccttaccctttctcaccctgtggggaattcttgctgagagggctttggaatcaggaatgaagccagagggcagggctgacagggaccatttaaatgctgcaactcctagagattcacatggaagcctggacacaattcagaagagccaacccaaggaagcaaaaatgtcaccactacctgtgagttaaaaaggcacagccttcaataatctcaagtcacattaaagaaggtggaaaaagggagattttatgagaggaaaatatgagagtttctattgtgaatgttttactgagattggaggtgtgtggaagacagagaccctgggactatgatgtctgagatgtttgtggggtgtcaggtgtggcccatggaccagtgtaaccctctgtgagggtgtgatagtgtctgatgagagtcaactctgctgagatgatgttacgttaggtaaaaggtgtaaagcccaccaggatgggtgggacgtgcctgagtgtaagagggtgactgtgttttgtcttcctgtctgtgatgtgagtgtgtgtgagcacacccagaccaatgcatgagcatctttatatggacagtgagcaggcatgtgtgactcagtgagtggtgtggctctgtgtgactgtggtagtgtgtgtgatgggatgtgactaggtgttgaactgggaacatgcacgtggccttctgtccatgtgaagtttcctccttacacagcagggcctctgatgaagcagctgtgcatcttcccatgtgtgtcagtgtggatcccgggtggcagaactggtggggatcttggggactgggagttaccaatgactcatttgtgagcattaatgagagcagaatgtatgatctgtagatgtctcttcccaggcagagtggaaaagaggaatccagactatgggaacaatggtccctcaggtggggtctgcacatagtgaccatgatctcctgcctctcatcctcaggtcttttcctgtctcccacccaaggctgccattcccattgtaggtcaggagggtgtgcaagtcctggctctctgaggaagaacattggagactgtggttttagagactgaatcacctcaaactggaaaggaacaagggtagcctcagttcagatagagtttacagtggatattaatcatccaagtagctgggtttgctggctcatgtctataatcttaccattttgataggcaaaaatgggaaaataacttgaggccaggagtataagagcagcctgggcaaaatagtgagacaccgtctttacaaaaactttaagtgtcagacaggcaacttggtgggcattttttttttgagacggagtcactctgtcacctaggctggattgcaatggtgcaatcttttcttactgcaaccttcgcctcccgagttcaagtgattctcctgcctcagcctcctgagtacctgggattacaggtgcacaccaccacgcttggctaatttttgtatttttagtagagacgggatttcaccatgttggtcaggctggtctcgaactcctgacctcgtgatcgaccttccttggcctcccaaagtgctgggattacaggcatgagccactgcacccagccttggcgggcatctttcaccaaagctactcaggaagccaaggtgtgaggacccctgcagcacaggagttcaaggcttcagtgagctatgggtgcaccactacacatcagcctgggtgagagagtgagaccatgtctcagaaaggaagaaaaattatccacttgtaggttgtctctaattacttccctgacccgcactcttcatttgtccaagtgctgcagctgtgctctcaacaatttttacaacttctgggaaagatgcccatggcccttgacgatagtgatgcatgtgcatcccacacacaggggtttcctgttcttttgttatttccctctctctttcaacaagtgttgcttcttacggattgaatttctccactgatagatcctcaagtcttgttttcacagatattaatttctctatcactaagatcacccattagtaagaattactaataaagataaaaaataaaaagtaaagaaagtacagaaaaaaagaattttaaataatcttcctagtacctgggaaacagttaggcagagttcaggtatggatctaagatggcactgtcagtaagaggcagaatcaggactggagtccaggcagcctggctcctgaatcctagctcctaactatgagaccctcatgtctttaggaatatggagttctgactgtgatagggtgaaagagggaagtcctcacagtttgcctgttgatctctaattttctacatcatggtaatctgtcacaaaaggggaggccacacctggcccagcccctttcacccactctcaatcccctagcaggtgccacacagaaggcgtgtcctcgtccattggttcttgcatgacaatcagagggacacggatcctccctttcatgtgagtactgcatggcacaggggtggaaaagaagggagaatatttactcaggaggtggtctcatgtgagtgatgtggaaatttctagttggcaggatggaggaaccatgcaggcgcaggtcctggagaccctccagcaccaagcatgaaacctgcagtggctgaactgtgggccagtcatgaggtctaagggaggagaacactcaggggttagggctgtggctctttatcaaggggcacagaattttcagggaatggacaaggcatagacccaggtaagtgactgtggctcactttccatcttgtgaggggaagagaatctccccacctgggggatatacgaggagctaaagcagccccacagggaccaggcctgcagtatcaccagagagatcagggaggcttctttatgccttggggaaaagaaggaagggatttgtgtgtgtgttgagtgtgtgtcctacaagggaggggcctgcccaacactccgtgtgctttgccctcagcaatgacccagagctgcgggtggaattctacactgggatgaatgagaactcagacatcgccttccatttctgagtgcactttggccattgtttggtcattgacagccatgtgtgtggggcctggaagtgtgaggggagatgccacaatgtgttcttcaaggacggcaaacaatttgatctgagcatcttggtgctagacaatgaataccaggtgagtgccctaggagctcccggtatccagcctccatgggttctcagagcaggaggcagctctccctggcctgacccaaatagattttcaggacccatttctcataactactcttaccccaggctttttatcacagagcaccctctggttgcaccgctatcctcagctcgtttccaaaatctgaccgtgatcagtatcagctcatctggcatttcccccaaggtgaagaatctcctgtcttttctcactgtattcatttctacttatgttgctgtttaaattttcactttgctgaatgaatacaatattcataagaataaaattgttttagtcaatgaaaaattaaggctttgtctcactcctggacccaatcttattcctgagagcattaccagcgctctgctctccttccacaggaaatctttgcttatagaagcatatagatctacaatttcatttgtttttaagaaaatcctagtatacattgctccacacgttacaccttaaaaactgagttgatttgttgtgaaagaatatatcttgaagataccgtctattaatggtgcttcctcagtttttaaagaatgcataatattgcattataaggattacctaaaattattaatcttgactctttttaagggccttgaggttatttccaatattttgctctcactaatggtgctgtattaagacttctagtcaattcttttgttttatccacctcccttacttatattgaaagataatcataaagaaatgaaaaactggttcaaaaatgtgtgcattttaaatttaacaaattgacacctagaaggttactttatagactcagtaatgaagaatatatccaaatgttctggccctttcttatgagtagagcaaaagattcacattttattcagattcaagtgaaggatctctttctatgcttagaaaccgttcaaaatgatagcctatgttttgcaacacttgtccaattctacctctccaacaacacttgaattttattcttggccaccatcagcccagatctaggcaactccaaagagaaactgggccatcagtagggaatggcagtcagagttcatggaacagatatatatgcattcaatgaacataatccagtgttaatcctgtttgaacccctgtacaagatgcagggattcaagttcatgaaatacagtcactagccatggggattttccaagctagacgggaggctgagcaaacatagaccatgtgacacagagtggtacagccttgctggaggaaacagaggaaacactagaaataatgtgagcactctctcaaatagttaatctttaacaggattgtgagtcttgggttcagttatataactagcagttttctcaggggatgttgtaggtataggagagagtagagagaaggctgaaagtttgtttggtggcatactgtctttctgaggcacttttcctcttgtaggtaataataaatggccaacaccatacatctttgcccatccacttccaccatgttctatgaagattttgcaagtgtgggaagatgtctccctgacctcaatgtctgtctgcaatttatggagatgaccacacccctcattgttgaggaatccctctttccatgtgaccataggatccccagagcctgctaacagcatgatctctcctcacccttttccctacacttggtcattaaaacatcaccaaacttcccagaatttggttcttgctttaagggggaaagagaaagtggtaatccccaagaggccccgaggaactttatgggaagcatccagaaatcaaataggataaaccttcttgtgactccaggagtgaatgacaaggtccctgcaatatcttaggagacattaggtacagcatcctttgacagcatattgttgacatcagagactctgagacaaaatctttaccctatcttagatgactcactgcactgaaatgttaggtagatgtttacagccacacagatgtacctcgtggctttggggagaaattttgtaacttaagaacaatctagtggaatttcctaatactttccattattttcaggatatttattgtatgttaacacggtgcctggctctgtataggctgccatacaggagctttacaaaaagacacgtttctcacttgaaaatttcaatccaagcaacagttagagaatcacaggagtccaaagatttctcttaaagaaccccaattgtggaagatagtgtggcaattcctcacggatctagaactagaaataccatttgacccagcaatcccattactgggcatatacccaaaggattataaatcattctgcgataaagacacatgcacacatgtgtttcttgcggcactattcacaatagcaaagacttggaaccaacccaaaagtccatcaatgatagactggattatgaaaatgtggtacatacacaccatggaatactatgcagccataaaaaggatgagtttatgtcctttgcagggacatggatgaagctggaaaccatcattctcagcaaactatcagaagatcagaaaacaaaacaccacatgttctcactcataagtgggagctgaacaatgagaacacatggacacagggaggggaacgtcgcacactggggcctgtttgggggtagggggctaggggagggataacattaggagaaatccctaatgtaggtgacaggttgatgggtgcagcaaaccaccatggcacatgtatatctatgtaacaaaactgcacgttctgcacatgtaacccagaactaaagtataatttttcttaaaactaaaaaataataataataattgtgagatttttccaaagtatgtggcagaatcctgggatttctatttaaaaacaagtggtcatggttttagatcagaaaatatgtagtttatttttgggatggacacaattcatacacatggacacagtgagctgaccttgctttgctgctctttcattaggcattgcagcacagcaaagctcccaacacacgttggcttacagaaatcatttactctgatctttcttggttaactggactcatgtgggtagtagatcatgtggtgagagtcatgttttctgaagcgtcttttagtttgggattccagaagatgcttcactcatgtctgactcaacacgagggctgggtgagcacctacgggctggctgattatctccttccctacgtcacttccctattcatgccttgaattccctcaaatcataagagtctcatggttcttggacttaaggaatgatgattggctgccaccaaagaaagccttccaaaaggctcaaggagaaggtgaaaggcatcataggacctggctttgaaaggcagacagtgtcacttctatgacattatattgatcaaagtgagccatacacaagcccaaatcaaagggaggggggtttcataagatgtggttattttgacatgcagtcatgagggagcatccttggcaactatttccactcagtcctcactggcttacatttttcccatatatcaaaagcactaatcctgtaaggaaccactgaaggcaatacacttataggaacaggctcagattgtagtccagaatgttatcatccaatcaggatctggtgtccatgaagtgactagaaattatcatgtgcactttctttcaacatctgcactaaagaaatacattatctgccctatacatattaaacctacaagactaaaacagatataggaaaatgcagtgaacacacttattttagagggacaaaagataataaacagcaccctgaaagcaagatgggtcaccaacaactctactggagccacccacaaaaaaatcagccagggttctcacccttgttgcatctgctcaaaccagcatctccttatctgaaaatattgtcttgatatgtgccgcttctgtttccacaagtacttaaaggatataggtctcattaagttggactaagtgatgctccttgaattaataagcaagacatccactcagtgaaagaaaccatgctaactctttgtacatgaataaaaattaaaataaagaaaccaatacaaacaaacaagaacaaaaaaaaaataggcatccatcactggtccacatcttgctgaagccaactatacccgtattttcatcttctctgaaaacgtttctctgcaacagttggctccaccttctactgtcagcttcttagagctcctaccaagtaggcacaatgacagcccttttccctctataagagctgttgtcatctggttcatagcacaaatagagaaccatttaggagaagataaacaacatattacctaaaagccaaacaatgcagactgaagagggtctcatcaaatagcctctttgtctgcagggcctatcacaggtgtcaatttgatcatcttcatcctctctttccatgttcattgccacaacttgttcagctccaaccttactcatgggtatgcctctctccttgccctcctttaacctaatattcatataccttgaggtgtcaatgcacagtaaatgacaccttcatgcctctctttcttgttgctttcctgtatgaactgaaattccctccgctgtcactggaaagtctcaggttcttgttaggtacactttcccccttatatcatccctctcacagttttggtcaccgccctattttgatgatggatcataggccccctcatcagcatggaaatcatttcttggggaattaggcaatacttgctctgagtggataaaaactatcttggaccccatgagtttctgagcagaacatgagattgatttcatatctacatgtcgctggacgatgcccattgtatttgcatgacctacagtgtcctacatgctgcccctgctatacaaacacacagtgactgccttttcttgactgatattcaccagttcagttcagctcatataggccatttgttactctcatctttataccaactactaccctatgctcatggtggccaggagtgatgtctcagataaaaagagaagacatagagccaaggaaccaatgttgaacaaacgatttttgtttgcctctggagacttactcaacatctctttcatgcttgtcaacccaagttcatggccttctcccagcaaatacatcattgctgaaaacacagtaggttatttccgcagtctaaagccttaccttttgaaaggtctgtagggctttccagtttttgctgaaagcccccaaagaataaatctactctttgctaacgttgtccttgatgtccaagtctcccaaagctgtttcttctgtggtgctgtccgtggtgctgagctctggtgcgtctgggcctgtatttgcaagtgaggggccaataagacagaattaacagagaaattttttgttttgtatttgataaatcacagctcaaaatatgtatgatgaacggagcaggaattgaatttggactttcagatcacaatttctgcagtgccctctctcaccgtcctattcaacatagtgttggaagtcctggccagagcaatcaggcaagagaaagaaagaaagggcatccaaacagaaagagaggtcaaaccatccctgtttgcagatgtcatgattctgtatctagaaaacatcatagtctctgcccaaataattcttaagctggtaaacaacttgagcaaaatttcaggatacaaaatcaaagtgcaaaaattactagaactcctatataccaacaacagcaaagcatagggccaaatcaggactgcaattccattcacaattgccataaaaagaataaaatacctaggaatacagctaaccaggaggtgtaagatttttaccatgaaaattacaaaacactgcttaaaatatcagagatgacccaaacaaatggaaaaacatcccaggctcatagatagcaagagtcattatcattaaaacagccatattgcccaaagaaatgtacagattcaatgctatttctgttgaactacctatgacatccttcatagaattagaaaaaaactattttaaaatactcatggaaccaagaacgagttgaataaccaagacagttcttagcaaaaagaatcaagctggaaacatcatattacccaatgtcaaactgtgttacagggccacagtaacaaaacagtatggtactggtacaaaaacagacacagagaccagtgggacagaagagagagcccagaaataaggtcacacacctacaaccatcatcagacccttccactaagctgaccaaacaagcaatgtaaaaaggatttcttattcaagaaatggttctgggtaactggctaaccatatgcagatgattgaaactgaaccccttcatcacattatatagaaaaatcaacacaagatgggttaaagacttaaatgtaaatgcaaaactataaaaaccttggaagactacataggcaataccattctgaatgtagaaatggacaaaagttttatgacaaagatgcgaaaagcaacctcaagaaaagcaaaaattgacagtggatttatttaagctaaagagcttctgcacagcaacagaaactatcaacagagtcaacagacaatctacagaatgggagaaaatatttgaaaattatgtatctgaaaaaggtcttatatctagcatctataaggaacttcagtaactttgcaagaaaagaacaaacaactccattaaaaagtgggcaaaggggcaggacgcggtggctcacgccataatcccagcactttggaaggctcaggagggccgatcacgaggtcagaaaataacttgagaccagtctgcccaacatggtggtctcagacacctagaccaatggaacagaatggagaacccagaaatgaggccacacaccgacaaccatctgatcttcaacaaagctgaccaaacaagcaacggaaaaaagactccctactcaagaaattgtgctgggagaactggctagccatatgcaaaagattgaaactgaagcccttccttaaaccatatacaaaaatcaattcaagatggattaaagacttaaatgtaaaatccaaaactacaaacaccctggaagacaacctaggcaataccatgcaggacataggcatgagcaaaggtttcatgatgaagatttcaaaggcaatcacaacaaaagcaaaaattgtcaaactgaatctaattaaactaaagtgcttctgcacagcaaaagaaactatcaagagagtaaacagacagcctatagaatgggagaatatattttcaaactatttatctgaagaagatctaatatccgagtatctacaagaaacttcaacaactttacaagaaagaaaaaacaaacccataaaaaagtgggtaaagggcttggcacagtggcttatgcctgtaattccagcacgttggacagccaaggctggtggatggcttgagcccaggaatttgagaacaggctgggtaacgtggcaaaaacccatctctactaaaattagaaaaaattagcctggcatggtgacatgagcctgtattcccaactactcaggaggctgagctgggaggatcacctgagcccagaagccagaggttgcagtgagctgagacagtgccacaccactccagcctttttgtcagagtgagacctgttttaaaacaatgaaaaaaggtgagcataggacaggaacagacacttttcaaaagtagacatacaggtggccaacaagcatataataaaagcttgacatcactgaacattagagaaaagcaaaccaaaaccaaaatgagataccatcccacaccagtcagaatggctcttattaaagtcaaaaaaggacagatgctgacaaggttatgaagataagggagcacttacacattgttggtggaagtgtaaattagttcacacattgtggaaagcagcgtggtgattcatcaaacagctaacaacagaactacccttcaacccagcaatcccatcactgggtgtatacccagaagaatagaaatcattctgccataaagacatatgcacatgaatgttcattgcaaaactatgcacaatagcaaagacatggaatgaacccaaatgcccatcaaggacagattaaatacagaaaatgtggtacatgtacacaatggaatactatgcagtcctataaaacagtgagattatgtcttttgccataacatggatggagctagaagccattattctcagcagactaatgcaggaacagaaaaccaaatactgcatgttctcacttataagtgtgaactaaatgatgagactcatggaaccaagaggggaacaacacacactggggcctacttgagggttgagggtgagaggtgcaataggagcaaaaaaataactattgggtattatgcttagtacccagatgaagaaatcataattaccacaaaacccatgacacaattttatctgcatgtgtaccactgaacctaaaataaaaggaaaaataaatcaaagaaaaaaacaaatctcaattctgttccaagatggctgaataggaacagctctggtctgcagctcccagtgtgatcaacgcagaagacagtgatttctacatttccaactgaggtacctggttcatctcattgggactggttggacagtgggtgcaggccaaggagggcgagctgaagacctgggaagtgcaaggggtcgggagattaccctttcctagcaaaggcaaaccatgacagactgtacctggaaaatttggacacaaccaaccaaatagtgtgcttttccagtggtcttagcaaatggcaccccaggagattacatcttgcacctggcttggcaggtcccatgcccacgaagctttgctcactgctagcgcagcagtctgagattgacctgggaggcagcagcctggcaggggaggggtgtccgccattgctgaggcttgagtaggtaaacaaagtggccagggaagctcaaactgggtggagcccaccacagctctgcaaggcctgctgcctctgtagactccatctctgggggcagggcatagctgaacacaaggcagcagaaacttctgcagacttaatcatccctgtctgacagctgtgaagagagcagtggctctcccaacgtggtgtttgaggtctgagaatggacagactacctcctcaagtgggtccctgacccccgtttagcctaactaggagacacctcccagtaggggccgactgacacctcatacaggtgggtgccccttgggacaaagcttccaaaggaaggatcaggcagcaatatttgctattttgcaatatttgctgttctgcagcctccactggtgatacccaggcaaataagagtggacctccagcaaactccaacagatctgccgctgagggacctgactgttagaaggaaaactaacaaacagaaaggaatagcatcaacatcaacaaaaaggaaatcctcaccaaaaccccatctgtaggtcaccagcatcaaagaccaaaggtagataaaaccacaaagatggggagaagccagagcagaaaagctgaaaattctaaaaaccagagtgcatcttctcctccaaaggatcacagctccttgccagcaccggaacaaagctagatggagaatgactttcatgagctgacagagctaggcttcagaaggtcagtaataacaaacttctccgagctaaaagaggatatttgaacccattgcaaggaagctaaaaatcttgaaaaaagattagatgaatggctagctagaataaacagtgtacagaagaccttaaatgacctgatggagctgaaaaccatgacacgagaaatacgtgatgcatgcacaagcttcaatagccaattcgaccaagcggaagaaagggtatcagtgatcgaagatcaaattagtgaaataaagcaggaagtgaagtttagagaaaaaagagtaaaaagaaatgaacaaagcctccaagaaatatgggactatgtgaaaagaccaaatctacgtttgattggtgtacctgaaagtggcggggagaatggaaccaagttggaaaacactctgcaggatattatccaggagaacttccccaacctagcaaggcaagccaacattcaaattcaggaaatacagagaacaccacaaagatactcctcgagaagagcaaccccaagacacataattgccagattcaccaaggttgaaatgaaggaaaaaatgttcagggcagccagagagaaaggtcaggttacccacaaagggaagcccatcagactaacagcggatctcttggcagaaaccctacaagctagaagagagtgggggccaatattcaacattcttaaagaaaagaattttcaacccagaatttcatatccagccaaactaagcttcataagtgaaggagaaataaaatcctttacagacaagcaaatgctgagagattttgtcaccaccaagcctgccttacaagagctcctgaaggaagcactaaacatggaaagaaacaactggtaacagccactgcaaaaacatgccaaattgtaaagacaatcaatgctaggaagaaactgcatcaactaacaggcaaaataatcagctaacatcataatgacaggatcaaattcacacataacaatattaaccttaaatgtaaatgagctaaatgctccaattaaaagacacagactggcaaattggataaaaagtcaagacccatgagtgtgctgtattcaggcaacccatctcacgttcagagacacacataggctcaaaataaagggatggaggaagatctaccaagcaaatggaacacagaaaaaaaagcaggggtggcaatcctagtatctgataaaacagactttaaatgaacaaatatcaaaagagacaaagaaggccattacacactggtaaagggatcaattcaacaagaagagctaactatcctaaatatatatgcacgcaatacaggagcacccagattcataaagcaagtccttagagacctacaaagagacttagactcccacaccaaaataatgggagactttaacaccccactgtcaatattagacaggtcactgagacagaaggttaacaaggatatccaggacttgaactcagctctggaccaagcagacttaatagacatctacagaactctccaccccaaatcaacagaatatacatttctcagcatcacatcgctcttattccaaaattgaccacatagttggaagtaaagcactactcagcaaatgtaaaagaacagaaatcacaacaaactgtctctcagaccacagtgcaatcaaattagaactcaggattaagaaactcactcaaaaccgcacaactacatggaaactgaacaacctgctcctgaatgactactgggtacataacgaaatgaaggcagaaataaagatgttctttgaaaccaatgagaacaaagacacaacataccagaatctctgggacacatttaaagcagtgtgtagagggaaatttataccactaaatgcccacgaaatttctttgtggaaagatctaaaattgacatcctaacatcacaattaaaagaactagagaaggaagagcaaacaaattcaaaagctagcagaagataagaaataactaagatcagggcagaactgaaggagatagagacacataaagaaccaacaaaaaatcaatgaatccaggagcttgttttttgaaaaagatcaacaaaattgatagaccgctagccagactaaaaaagaagagagaagaatcaaatagatgcaataaaaaatgataaagaggatatcaccaccgatcccacagaaatacaaactaccatcagagaatactataaacacctctacgcaaataacctagaaaatctagaagaaatggataaattcctggatacatacaccctcccaagactaaaccaggaagttgaatctctgaatagacaagtaacaggctctgaaattgaggcaatgattaatagcctagcaacaaaaacaagtccaggaccagatggattcacagctgaattctaccagaggtaaaaagaggagctggtaccattccttctgaaactattccaatcaatagaaaaagagggaatcctccctaactcgttttatgaggccagcatcatccaaataccaaagcctggcagagacacaacaaaaaaagagaattttagagcaatatccctgatgaacattgatgcaaaaatcctcaataaaatattggcaaaccaaatctggcagcacatcaaaaatcttatccaccacgatgaagtcagcttcatacatggggtgcaagtcttgttcaacatactcaaatcaataaacaaaatccatcacataaacagaaccagtgacaaaaactacatgattatctcaatagatgcagaaaaggcctttgacaaaattcaacagcccttcatgctgaaaactctcaataaactaggtattgatggaatgtatctcaaaataatgagagctatttatgacaaaccgacagccaatatcatactgaattggcaaaagctgaaagtattccctttgaaaactgacacaagacagggatgccctctctcaccactcctattcaacatggtgttggaagttctggccagggcaatcaggcaagagaaagcaataaagggtattcaattaggaaaagaggaagtcaaattgtccctgtttgcagatgacatgattgtatacttagaaaaccccatcatctcagcccaaaatctccgtaagctgatgtgacttcagcaaagtctcaggatacaaaatcaatgtgcaaaagtcacaagcattcccatacaccaataacagacaaacagagagccaaatcatgagcgaactcccattcacaattgcttcaaagagaataaaaaacctaggaatcaaacttacaagggatgtgagggaccctttcaaggagaactacaaaccattgctcaatgaaataaaagaggatacaaacaaatggaagaacattccatgatcacggataggaagaatcaatatcgtgaaaatggccatacttcccaaggtaatttatagattcaacgccattcccaacaagctaccaatgaccttcttcacagaattggatgctacctgacttcaaagtacaccacaaggctacagtaaccaaaacagcatgatactggtaccaaaacagatatatagaccaatggaacagaatggagccctcagaaataacaccacacatctataaccatctgatctttgataaacctgacaaaaacaagaaatgaggaaaggattccctatttaataaatggtgctgggaaaactggctagccatatgtagaaagctgaaattggaccccttccttacaccttatacaaaaattaattcaagatggattaaagacttaaatgttagacctaaaaccatgaaaaccctagaagaaaacctaggcaatatcatttaggatgtaggcataggcaaggacttcatgactaaaacaccaaaagcaatggcaacaaaagccaaaattgacaaatggatctaattaaactaaagagcttctgcacagcaaaagaaactaccgtcagagtgaataggcaacctacagtatgggagaaaatttttgcaatctacccatttgacaaagggctaatatccagaatctacaaagaacttaaacaaatttacaagaaaaaaacaaacaaccccatcaaaaagtgggcaaaggatatgaacagacacttctcaaaagaagacatttatgcagccaacaaacacaggaaaaaatgcttatcatcactggtcattagagaaatgcaaatcaaaactacattgagataccatctcacaccagttagaatggcgatcattaaaaagtcaggaaacaacagatgctggggaggatatggagaaataggaacgcttttacactgttggtgggagtgtaaacgagctcaaccattatggaagacagtgtggccattcctccaggatctagaactagaaatatcatttgacccagcatcccattactgggtatatacccaaaggattataaatcatgctactataaagacacatgcacacgtatgtttattgcagcactgttcacaatagcaaagacttggaaccaaaccaaatccttcaatgatagactgaattaagaaaatgtggcacatatacaccatggaattctatgcagccataaaaaaggatgagttcatgtcctttgcagggagatggatgaagctggaaaccatcattctgaacaaactatcactagcacagaaaaccaaataccgcatgttctcactcataggtgggaattgtacaatgagagcacttggacacatggcagggaacatcacacatgggggactatcatggggtggggggcagggggatggatagcatcaggataaataatgtaaatgacgagttaatgggtgcagcaaacaaacatggcacatgtatacctgtgtaacaaacctgcacattgtgcacatgtaccctggaacttaaagtataataataattttttttaaatctcacctttctcccagaatctgcagaagaaacagtctccctcaaactttgatttacatggacaccaacagagggtgtagctagagcccaagtgtgtgacagtcagatgaaagtggcccttacctagcaaagccaagtggcttagtgtggggcaggttcatgcaagaaatttctctacttctctctgcagatcctcctcaggatcaaggtcagtgctctcccagaacatttaaaggcagagagaagaattaccttttagggctaacttgtttcccccaaaatctccaactttttttttcttgtttagccattgtacaaaattgggaaaatgtacaccttctgggtagattctgcatagtggagaaaaggcttgagaggcacaaaggctgggctttacaatcactacccctcactccatcatccttatctatgcatttccctggtaacccaatccacagtctggtaccttccccaatgtcatttctgctgcattacagacacagacttgcaaatagttatggttgtgactgagtttcttcgtgacacctgaccctttctcatgctgcaaggaaagcttgctgggaggagcatggaatctggaatgatgccagagggcaaagctgaaaggggtcatttaagtgctgcaactcagagattcactcagaagactggacacaattccgaaggtcgcccagaaggagaggacaatgtcatttctaactgtgagttgaaaaggcacagccttcaataatctcaagtcacacaaaaccaagaaagatgtggggtattttatgagatgaaaatatgagcattcctactgtgaatgctttactgagagttgtgggtgtgtggaagagaaacactgaggctgggtatctgagatgcttgtagcatgtgggttgtggatcctggacaaatgtaaccctctgtgagcatgaggtggtatctgatgagagtgaactctgatgagatgatgtgactttaggtgggaggtggatggcacaccaggtcaagcaggtgtttgtgtgagtgtaaggggggtgattgtactttgtcttcctctttgtgatgtgagtgtgtgttagcacagccagaccagtgcatggtcatctttatgtgcgcagtgagcaggtgtgtgtaactcagtgagtggcatggctctgtgtgactgtgggtgtgtgtgctgggatgtgactgagtattgaagggaaaacacgcatgtggccttctgtgcatgtgaaggttcctccccacacaacagcacttctgatgaaggaactgtgtgtcttttcatgtgtggcaatgtggatcccaggtggcttaactggtagggatcttggagattgtgagttaccaaggacttgtttcagatcacttatgagagcagaatgtatgatcagtagatgtctcttcccagtaagagtggggaagaggaatggagactatgggggtgatggatcctcaggtggggtctgcacagagtgaccactgtctcttgcctcccaggctcagcttccctgtccccagcctatcctgtccttttcattgtgggacaggaggtttgctagagaaggatattagaggccatggtttcagagactgaatcacgtaaaatatccactgtaagctatgtctcaactgagtctaaacttgttcctccacccatgaaggaacaagtctagtctcagttcagacagagcttacagtggatattaatcaacaaagcagctgggttcactggctcacggctataatcccaccaatctgagagacaaagatgagaggataacttgaggccagaagtttgaggccagtctgggtatcatagtgagaccctttctttaaaaaactttaaatatcagactgccagagtggcaggcaccttttgccccagctacacaagagggggcagatgtgtgaggatcactgcagcccaggagttcaacgtttcaatgagctatgatcgcaccactgcatgtcagcctgggcaacagagcaagaccctatctcaaaaatacagaaaaatcatcaaccacttgtagtcattgtagaaatcaatcattccctccagttatgtccctgacccacaggcttcacttgtgcaagtactggggctgtgctgtcagtaatgtgtgccacttcttggaaggacgtccattgcccttgatgattgtgagagttgaaaataaggcagatcagtgtttcaggaggactcccctgttctgttaggtcacccctaacaggccctacacatgccagggattagggtaaaagttttacatgtattaactgctctattatggagaacttcctacacagtaggaattcatgataatcctccttgttttagggaaactgaggaagtcaagtaaccgatctaagattgcactgctagtaagaggcagaatgaggactggaatccaggcttcttggctcctgaacccttgctcttacctatgggtccaccataccttcaggaatgtggggccctgactgtggtagagtgaatggggagagtccacagagcctgccctgtgatctctaacctcctgcaccatgggaatatgttacaggaagggagactgcacctgaccctgcacctctcacttattctcaataccctggcaggtgccatacaaactgcctgtgtctttgtctgttggttcctgcgtgataatcaaagggacactgatcgactcttctatgtgagtactccatggtccaatggagggggtggaggagaaaggagaatatttgctaagagtttgaccttatgtgtgggtgatgtggaaatgtctaattggcaggatggaggccccatgcaggtgcaggtcctggagaccctccagcaccaggcatgagacctgcagcaactgcatgtgggccagccatggggcctaggggaggagaatactcagtgggttgggactgtggctctttatcaaggggcatagaattttcagggaatgaacaagtcacaggcccaggtcagtgactgtgattcagttttcatctggggatgaggggcacagcatctccctgcagggggcacgaggagctgaagcatccccacagggaccaggcctgcagtatcatcagagagaattttaccctgggtaaatgggggaagggatttgtgtgcgtgtcaagtgtgtgtctgtgcaatgaaggaacctgtccaatatgctgtgtgctttgccctcagcaacgaaccacagctgcaggtggatttctacactgagatgaatgaggactcagaaattgccttccatttgcgagtgcacttaggccgtcgtgtggtcatgaacagtcgtgagtttgggatatggatgttggaggagaatttacactatgtgccctttgaggatggcaaaccatttgacttgcgcatctacgtgtgtcacaatgagtatgaggtgagcaccccaggagctcgcagtacccaggctctttgggatcccagagcaggagtcagctctcattgacctggcctcaccagtccctcagggcccatctcccgtaactacccctgccccaggttttcatcacagagcaccctctgcttgcactgccgtcctcagctctttcccaaatctgaccaaggtcaaggtcggctcatcttccatttcccccaaagtggagaatctcctctgtcttttcacatagtgctcatttctacttatgccattatttaaattttcatgtagctgaatgaatacaatatacttaagaagaaagttttttctatcaatcaaaaattatgtcttcgtctcacttttgggccccaattctactcatacgaataacattaccagagctctgctctccttcagagagaatcctttttctttttttttttttttgagacagagactcactttgtcatccaggttggagggcagtgacgtgatctcagctcactgcaacctccacctcccagattcaagcgattctcttgccttagcctcccaagtagatgggattacaggctgatttttttatttttagtagagacggggtttcaccatgttggccaggctggtcttgaactcccagcctcaagttatcaacccaattcagccttccaatatagtggattacacgcatatgccaccgtgccaaccccttcagaggaaatctttgcctatggaagcatatagatatgtctatgatttcatttgtttttaagtaaatcctggtatgttgctctacacattatgctttaggaactaagttggtttttcatcaaagaatatatcttgaagacattatcaatccatgtttctgcttcaattgtttatttgggcattgaagttgtttccagtattttgctctcacaaatgatgctgtattaagctttcaaataaatccttttgtcattaccaacctcccaatacttacattgcgatataattacaaaaaatgaaaaaactggttgaaaaatatgtgcattttaaatttgaaaaattaatactaataaggtgactctctatacagcctcaatataaggaatacatccatactttcttactttctctaacgagtaggccaaaagattcacatcttattcagattcaagtgagggatcttttcctatgcttagaagttgtcgaagataatatcctatgttatacaagacctgtcctcctttaactctctaagaacactgggtttcattctttgccattaacacctcagatgtaggctactccaaagaggaactgtgccatcagtagtgaaagacagtcacagttcatggaactgaaaagtatgcatttcagtgaacatggtctcgcactaaccctgtggcaggtcctgtgcgagatgcagggtctcaagttcctgagacacagttgctggtaatggggttgtccaggttagaagggaggctgaataaacagggactgtgtgacacagagtgtagaacttcactagataagaggaaacattagaaataaggtcagcaactgtctcaaataggcacaaaatgtcatctgtaaacagaagtgtatctacaacattcgcttgtataactaggagttttcttggggaatgttattggtactagggcagagtagagaagaggctgaaaacttgttgggtggcatactgtctttctgatgcatttttcctcttaaaggtaaaggtaaatggtgaatacatttatgcctttgtccatcgaatcccgccatcatatgtgaagatgattcaagtgtggagagatgtctccctggactcagtgcttgtcaacaatggacggagatgatcacactcctcattgttgaggaaaccctctttctacctgaccatgggattcctagagcctgctaacagaataatccctcctcaaccccttcccctacacttggtcattaaaacagcaccaaaccgtacatgatttggttcttgctttaagagggggaaagaggacgtgatcatccccaaaaggggccagggcattctatgggaggcatcaagaaatcaaaggggataaaccttcctgtgacaaagggagtgagtgacaaggtccatggaatgtctgataagacattaggaacagcatccttctatagtacgtagttgacgtcagacagtctgaaccaaaatacttacccaatctcagatgactcacggcacttaaatgttagatagctacttacagccacacaggtgtacctagtagctttggggaaaacctataactttaggaaaattatgtggaatttcttaatttttccattgttctcaggatgcttattgtgtaggaacactatgcctggctttgtgcaggctgctgtgaaggaagtgaagaaaaggatgacaagttttgcatgtaaagttttcaatccaagcaatagagaatcactggagcccagtgattccccttaaagaataccaattattcttattttcaaatatttgaaaagtttttcattttatgtggggagaatccaggggtttctctttagaaataaatggtcatggttttagatcagagaacacgtagattattattggaatagacacaattcatgtccatggacacagtgagcagatcctgctttgctgctattcttgcgataaattgcagcatagaaaactgcccaacacatattggctaaaagcaatcatttattttgatctctcccagctttacaggtttactgaattcatgtgagtggtaggtcatgtgatgggagtcacgttatttgagagatcttttaggctgggatttcaagggatgctttactcttgtccaattcaacactagggctgagtgaacacctggaaactggctgattatttccttcactacctcaccttcccattcatgcctttaatttcctcaaatagactctcacagttcttagacttaatgaatggtgactggctttcaccaaggtaagccttccaaaaggctcatggagaaggtgcacagcatcacaggacctacctttgaatggcagacagtgtcacttctatgactttacattgatcaagatgagtcacacagacagccctaatcaaaaggagaggactccacaagctgtggttattgtgactgtagtcatgaggggccatccttggcaactagttccactcagaactacttcccatataccaaaaacacaccctgtaaggaatctctgaaggcatacaattataggaacaggcctcagagtaaagtgcagtgtcttatctaatcaggatatggtgtctatgatgtgactacaacttatcacttgcaatctctctcaacatgtgcatcaaaggaacacattatctgctttatacaaatcaagcaaagaagactgaaggagacaggaaaaaaggcaatgaaaacacctattttagaggggcaaaataaaatagacagcagtcactaatctgtatcattggtgaaaccaaccagacacctattttcattttctctgggaatgtttctccgtagcacttgccctcaccctccattctcagcttcttggagttcctaccaagatggcagaataacagccctttccctatgcctggccaacatgttgaaaccacatctctactaaaaatacaaaaattagctgagcatggtggcaggcacctgtaatcccagctacttgggaggttgaggcaggagaatcacttgaacccaggagaaggtgcttgcagtgagctaagattatgccattgcactccagcctgggtgacaagagctaaactccatctcaaaacaaaacaaaaagaaatctaaatataattgagttgaatatttgaattttttattgacatttcaaattagattataattcaatttaaaagagcatctcatagaagcagatgtactcaattatgttaacgctgtggtttcatgtaagcaatttgttttgtgaagggacacaaatccaaccagattttaacagtgtataaatatgtatgtattaatttaattacaatgacaatactctcaactccccatttgaataaaggagagcatctgatctctgttctggggcaccgtgcactataggtgtgtggaaatacagatgccctcagctgtggggtaggctcagtgggacctggagtgctggagcccctgggccattcacctctggctacaaaagtcattgtctatttatccccagctgctatagaaatattattttcagtggctgtcatgatgcaaaagaaaagaagcatggagatttattaaacctttacatataagttatgttagtaaataaagtgaactttcttctggcttaactaaaaaatctatagtagtatttatgccttttggaaaatagagatggcaatttaaatattatgaagcaaagcaactgattatcaggtaagacaaccaactacaactgcagaattgtagaggttatgggttaaatgtataagaatatttcatagcaataatcttttaagactatgcaagagactccacagtggagtagaaattagaacagaattaataatactgtgtatgctctcagttcaccaatttatcaaaactagctttatgatgcaggagggtgtctgcccttttgcaattggaagaaaagaaagaatatttcatttttcgactctttagattttcttcactaacagtatttccacagctaagtaagggatttgcaagtagcatcaagagaaaaaagcaggcttgagcagcttttaaaatatggtcttaaaatatggaaattggagccatgtgtggtggctcacacttgtaatcccagcactttgggagcctgaggtgggaggattgcttgaggtcaaaagtttgagaccagcctaggcagcatagcaagatccccatcgttacaaaaaataataattttttaaaaaatcagctggatgtggtggtgcatgccttagagtcctagttacttgggcggctgaggtaggaggagctcttgagcccaagagttcaagtctgcagtgagctacaattgcaccactgtactctagcctgggaaacaaagtgagactctctctctctctctctctctctctctctctctctctctctctatatatatatatatatatatatatatatatatatacacatacacacacacacacacatacatacatatatatgtatgtatatatacacatatatatgtatgtatatatacacatatatatgtatgtatatatacacatatatatgtatgtatatatacacatatatatgtatgtatatatatacatacatatacatacatatatatgtggaaaagggaaggggccaagaatgtcaaagacattattaaagaaaaggaaagatttctcctgccaaatatcagaagttttataaagctacagcaattaagatagtgtggtcttcattgataaactgaccaatgaaacagaatagagagctcccaaacaaatctccacaaatttaatatttgatatgtgatgcaggtgacatggcagatcagcaaagaaagaaaggacttttcaatacataggaaagaaaaataatggttactgatataggaaacaaaatgaaattatattccttcttcgctctatatacaaacattaaattccagatggaccaaagacttatgtgtcagaaacaaaactttaaaacttttagtagaaaatgtaagtgaatgagacacaaaaagccatttaaccattaaaaaagattagatgttttgactatcacaaaattgagaactttttacatcaaaaagtgaaaagataagctgggcatggtgtctcaagcctgtaatcccaacagtagatcacctgaggtcaggagtttgacaccaggctggccaacatggtgaaaccctgtctccactgaaaatataagaaattagccaggcattggtggcagacactagcaatcccagctacttgggaagctgatgcacgagaatcttctgaacccgggaggtggaggttacagtgagccactgcactccagcctgaatggcagagtgagactctgtctcaaaaaaaaagtaaaaattaaaaaataaaagtaaaaaagtgaaaagataaactataaactagaagaagatatttgcagtacctaaaacctatgaaagattaatatcaaatcaacaaagtataaggagttcctatgaattaattttaaaaatagcatcccaaaagaaaattgggaaaagacattaatagggatttcacaaaagagaatgcccccaaaacataaaaattttctcatcctcattagtaatcaagaaaatgcacaagatactacatatctattcgctccacaaatattaagaagtttgacaataccaaatgtattagtcgacattcacgctgctgataaagacataactgagactgggaagaaaaagaggcttaatggatttatggttccacatggccaaggaggcctcagagtcatagcagtggatgaaaggcacttcttacatggcagtggcaagagaatatgagaaggaagcaaaagacgaaacccctgataaacccatcagatcctgtgagacttattcactataacaagaatagcatgggaaagaccagcccaagggattcaactacctccccctgggtccctcccttaacacatgggaattctgagagatacaattgaagctgagatgtgggtaggtacatagccaaaccatattaatctgctcctggcccctccaaatctcatgtcctcacatttcaaaacctatcatgccttcccaacagtcccccaaagtcttaactcatttcagcattaacccaaatgtctgctgtccaaagtctcatctgataaaaggcaagtctcttctgcctatgagcctgtaaaatccaaagcaagctagttacttcctagatacaatgggggtacaggtaattgagtaaatacagctgttccaaatgggagaaattggccaaaacaaaggggttacaggccccatgcaagtcctaaatccagccaggtagtcaaattttaaagccccaaaatgatctcctttgactccatgtttcacatcaaggtcatgctgatgcaagaggtggactcccatggccttgtgtagttctgcccctgtagctttgcagggtatagcccacctcctggctgttttcatgggctgatgttgagtgtctgaagcttttccaggctcatggtgcaaggtatctggggtctggaggacagtgtccctcttctcacagctccactaggaagtgctccagtagggactctgtgtaggggctctgatccttccacatttcccttccacatggccctagcagaggttctccatgagagccccacccctgtagcaaacttctgcttggacatccaggcgttttcatacatcctctgaaatctaggtggaggtttccaaatctcaattcttgacttctgtgcagttgcaggctcaacaccaggtggaagctgccaaggcttggtgcttgcactctcaaagccatggcctgagttctatgttggcccctttcagccatggctggagtggctgaaacacagagcaccaaggccctaggctacacacagcacagtgatcctgggcccggcccacaaaaccattttttccttgtaggcctctgggcctgtgatgggaggggctgctgtgatgatctctgacatgccctgtagacactttccccattgtcttggggattaacattcagcttctcactacttatgtgaatttcttcaggcagcttgaatttatcctcagaaaatggcattttcttttctatcacattgtcaggctgcaaattttccaaacttgtatgctctgcttcctttataaaactgaatgtctttaacatcatctgagtctcctcttgaatactttactgcttagaaatttcttccaccagataccctgaatcatctctctcaagttcagtgttccacagatctctagggcaggggcaaaatgctgccactctttttgctaaaacataatgagagtcacctttgctcctgttcccaacaagttcctcatctccgtctgagaccaccttagcctggaccttattgttcataacactatcagcattttgtcaatgccattcaacaagtctctatgaggttccaaattttcccacattttccagtcttcttctgagtcctccaaactgttccaacctctgcctgttaccaagtttcaaagtcgcttccacatttttgggtatcttttcagcagcaccccacttcactggtaccatattactgtattagtccattttcacactgctgataaagacaaattcaagtctgagaagaaaaaggggtttaattggatttacggttccacatggtgtgggaggcttcagagtcacggcaggaggcaaaaggcacttcttatatggcagcagcaagagaaaatgaggaggaagccaaagcagaaacccctgataaacccatcagatctcatgagacttattcactatcatgagaatagcacaggaaagactggcccccatgattcagtgacctcaccctgggtccctcccacaacatgtgggaattctgggagatagaattcaagctgaggtttggttggggatacagccaaaccatatcaacaaatatggagagactgtggatcaacaagatcatctcgaattaatacaggaggtgagagtttaaattagaacaaccactttggaaaataatttggattatcttataaaaatgagcattcttccaggagctggttttttgaaaggatcaacaaaattgatagaccgctagcaagactaataaagaagaaaagagagaagaatcaaatagacgcaataaaaaatgataaaggagatatcaccaccgatcccatagaaatacaaactgccatcagagaatactacaaacacctctactcaaatgaactagaaaatctagaagaaatggataaattcctcgacacatacaccctcccaagactaaaacaggaagaagttgaatctctgtatagaccaataacaggctctgaaattgaggcaataatcaatagcttaccaaccaaaaaaagtccaggaccagatggattcacagctgaattctaccagaggtacaaggaggaactggtaccattccttctgaaattattccaatcaatagaaaaagagggaatcctcccaaactcattttatgaggccagcatcatcctgataccaaagcctggcagagacacaaccaaaaaagagaattttagaccaatatccttgatgaacattgatgcaaaaatcctcaataaaatactgacaaaccgaatccagcagcacatcaaaaagcttatccaccatgatcaagtgggcttcatccctgggatgtaaggctggttcaatatatgcaaatcaataaatgtaatccagcatataaacagaaccaaagactaaaaccacatgattatctcaatagaagcagaaaaggcctttgacaaaattcaacaacccttcatgctaaaaactctcaataaattaggtattgatgggatgtatctcaaagtaataagagctatctatgacaaacccacagccaatatcatactgaatgggcaaaaactgaaagcattccctttgaaaactggcacaagacagggatgccctctctcaccactcctattcaacatagtgttggaagttctggccagggcaattaggcaggagaaggaaataaagggtattcaattaggaaaagaggaagtcaaattgtccctctttgcagatgacatgatagtatatctagaaaaccccattgtctcagcccaaaatctccttaagctgataagcaacttcagcaaagtctcaggatacaaaatcaatgtacaaaaatcacaagcattcttatacaccaataacagacaaacagagagccaaatcatgagtgaactcccattcatgattgcttcaaagagaataaaatacctaggaatccaacttacaagggacgtgaaggacctcttcaaggagaactacaaaccactgctcaatgaaataaaagaggatacaaacaaatggaagaacattccatgctcatgggtaggaagaatcaatatcgtgaaaatggccatactgcccaaggtaatttacagattcaatgccatccccatcaagctaccaatgactttcttcacagaattggaaaaaactactttcaagttcatatggaaccaaaagagagcccgcatcgccaagtcaatcctaagccaaaagaataaagctgaaggcatcatgctacctgacttcaaactatactacaaggctacagtaaccaaaacagcataatactggtaccaaaacagcataatactggtaccaaaacagagatatagatcaatggaacagaacagagccctcagaaataacgccacatatctacaactatctgatctttgacaaacctgagaaaaacaagcaatggggaaaggattccctatttaataaatggtgctggggaaattggctagccatatgtagaaagctgaaactggatcccttccttacaccttaaacaaaaattaattcaagatggattaaagacttaaacgttagacctaaaaccataaaaaccctagaagaaaacctaggcattaccattcaggacataggcatgggcaaggacttcatgtctaaaacaccaaaagcaatggcaacaaaagccaaaattgacaaatggatctaattaaactaaagagcttctgcacagcaaaagaaactaccgtcagagtgaacaggcaacctacaaaatgggagaaaatttttgcaacctactcatctgacaaagggctaatatccagaatctacaatgaactccaacaaatttacaagaaaaaaacaaacaaccccatcaaaaagtgggcaaaggacatgaacagacacttctcaaaagaagacatttatgcagccaaaaaacacatgaaaaaatgctcaccatcactggccatcagagaaatgcaaatcaaaaccacaatgagataccatcttataccagttagaatggcaatcattaaaaagtcaggaaacaacaggtgctggagaggatgtggagaaataggaacacttttacactgttggtgggactgtaaactagttcaaccattgtggaagtcagtgtggcaattcctcagagatctagaactagaaataccatttgacccaaccatcccattactgggtatatacccaaaggactataaatcatgctgctataaagacacatgcacacgtatgtttattgtggcactattcacaatagcaaagacttgtaaccaagccaaatgtccaacgttgatagactggattaagaaaatgtggcacatatacaccatggagtactatgcagccataaaaaatgatgagttcatgtcctttgtagggacatggatgaaattggaaatcatcattctcagtaaactatcgcaagaacaaaaaaccaaacactgcatattctcactcataggtgggaattgaacaatgagaacacatggacacaggaaggggaacatcacactctggggactgttgtggggtgggggaaggggggagggatagctttaggagatatacctaatgctaaatgatgagttaatgggtgcagcacaccagcatggcacatgtatacatatgtaactaacctgcacattgtgcacatgtaccctaaaacttaaagtataataataattttttaaaaaagaaaatgacataagaaaaaaaaaaaagaaaaaacagataaagtgcactttgtctgtatttacagcccataatcaagaaatcattgcccaatctcatgtcatgatgatatctgcctgtcattatcatttctcctatcattatcattgaaggtcttacgtttactcattgatacattttgagttcactattgtatatgttataagctaagggaccagtatgtgtaagtccagttttcccagcatcacgtgttgagaagtctgtccttttccaatgcgatggtcgtagcccattgtggactctcaggtgaccctctgtgagtgtttctaggctctctattctactcctttgatttctatgcctctccttaagccagcaccacactgtcatgatattatagctttttaaagaggtcaaacattggccacaataaaatatgcacttccaaagccatttttaggtattatatatcatggattaggctctttttttttattctcaggacctacatggacactatttctcatccttgtgatacaggagttattaagaaataatttttaggtagatagtaagggtaaaagttcttggtggaaattttcctgtaataagaaacaacccccaaaccatctcttttctaacagaaaaggtggcttgaagggccaggagagcaagctttgatatgcaaatactgggtcattagaaacgaggttcactcaatgtggtgattcctgccatcttttccttgtcaccaggtgtaccaagtgtcatggccactttcagataacaccatgtgttcgaaacatcatggcaacccgcatttgcatattaaagggctaagatgggagggccagatttttcacaggctacagaaattacacacctggtcaaaccaatcccctgggccctatggaaaccagaagccgcctcctccagcatcccaatataagcaatcacttttccaccacacatggtttttatgtgtgtgtgtgtgataggtttttatttattattatactttaagttctagggtacatgtgcacaacgtgcaggtttgttacatatgtatacatgtgccatgttggtgtgctgcacccattaactcgtcatttacattaggtatttctcttaatgctttccctccccccatcattctgagcaaactatcgcagggacagaaaaccaaacaccgcatgttctcactcgtaggtgggaattgaacaatgagaacacttggacacagggtggggagcatggggggttttttgttcgaatccccctctctctgtctctgtacgggggagctgttttcttccttccttctttcttgcctatgaaacttttcaccccttaaaaccactccacatgtgtccatgttgttaatcttatcagcacgagaccaaggaccctggttccctccagtcatcggagccatatcttttaggtgcattggccaggaatgggaattcattcatcagactggtgagtatggagcaaatctcaactttaaatctgtcttttaatctctaggctctcttccagctatcctgccaccaaactttctttctctctctacccgcggtctcttactgtctctctcactgtgtctaatgtgcaggaatctttacagttcagggaaacaggtctgttagagaagatcatgaatcaaggcaggcagtaactcaataaacgtctgtctctctaaggtttcgctggtgagcacatggtatttctaagccaaaaccgccacctggtggaaataaaaatcctcttcatgagacacttggttctctgtggtacgttgcagcttcacaatttctccattttgcacttttttactgctacttctgtggacgggaaactctggtttcaaccattaggagtaagatgtcttccacagccagattttagtcccaatattgtcccatcagtaggaaaactgccattcggttcctacactcttttaaggcacctattctgtctccaattaagacagtacttaattggtaaggggatattaagtttagaagttaaccagaacagttttttttaaagggtaaatgcattagcacgggtcataatagcaggcaatctagcacattgcctccattaaaggagccttgcccagaggtgacacagtctccccggagatccgttttcagggagccaggcaaactgcacatgtttaggaaatcaaaggtaaatcacacaaggcagataagctaagactgcatgggtaagcacgggtagccccatcacttagttcatccagctctatggcttggaggaccacacctacagccatgggtggcacatttaacatggtgccgggatccagaaaccagggaggggaagtaatcagaggatgctccctgtctgctcctccactctgggtcataccaaaaggaaggagactaagaagatgctttgtattctttcttctttttctaaatggataataaattatctttaggttgcacccctctggagtgcactctgaaacactgaaacttccttaatctcaaaactgtaaagagaaaagcaatttattttcttttgcacaaggacatggcatttttactaaatgggagggaagcggttctcataaacaaccctaactaaaacttcaatagctcaggaaatgataggaaaaggaagtactttttaatactcactataaaaggcctagaggaaaccagggccaaacctctcagttactctaagctgtctataatgaaccaaaagccagataataattctgtagcctttatggaaaggccaagagaggcactaatagagtacatctccttatcccctaattcaatggaggaacagctcattttgaaggagaagtttattacaaaagcagctcctgatattaaaactaaaaaagcaagcttaggacaaaataccaccttagagaacctcctgcaagtggcgactttggtcttttataatagggacaaggaggagtcccaacaaaagcgggggaatctcaagagaaggacagaggctccagcagcagctttgcaagcttgtaaagtccagaatccccaaggtacatccactagttgctattggcatggcagcccagagcatttttaaaaggaatgcccaggcagcaagatgaagcaaactcaaccctatccaggctgtggcaaaaaccactggaaacagaactacccccagaggcagaggtcactgggttcaaaatcagcctcacagatggtccagcaggaatgatgggtccaagggctccaacattggctccagtgactcaaactgccatagagcacaggagtcctagaggattctggaaatttacaaaaggaaagtaaacctccttctaagcactagagccagtctctctcttttctcctctctaatccaggcctccgctcttctcatagcacaactgtaaagggcatctcgggaaaaactctaatccaatatttttttcaaccttagctgtagttagaaagacctatttacacgtgcttccaagtcattgtcataatagctctactagtcaaaaaagcctccaagttaaccctaggaaataattcaactgtttacagcccacataatgtggcaggatcactgacctctaaggggagctcttagctagtaaacagccagtaaagcaagaagtacataaggcaggatgagcagtagtcactgccccaaacacaagcactcaattagctgagctaatagctcttacaagagcacttaaattaagccagagaaagatagctaacatttctactaactccaagtatgctttcctaattgtccatgctcatgctgctatttaaaaggaaaggcattttcttaccactaatgaatctcccataaaatatcaccaggaaattaataggttattatcctcagtttttcttccacaagaaatagcaggatgcattgtagggaacatcaaaagaaaataaataaggtaagcaaaggaaataaattaactggtcagccagctaagacagaggcaaggaagtctcagggcattaacacaactagtgaaagcccaagtccaggaactaaaaccatctttatttaatccaggaaatttagtattagtgaaaaatctcatctctctccttccctaagccaagctgggaagggccctccactgttcttctttcaaccctctcagtagtaaaatttacaggaatcaactcctgaatacatcacactaaagtcaaagcttaaaaagctgggggagcaacccctaacagtccagagaaacatccagaatgtccatgtggaaaagcagaaaatgttaagctaaaaatcacaaaaattaagtaactgagtaaggtctacccatcttactcagtcccacatttacctcaacatatacttgttgtcatttctgccctttcctgtcaaaatttgccaccaaatattaaaacttctttttaatgtataattgcagaaaattttaatgataaatgaaattgcacttggaactccgtaaatccccaaagggaaatgttatatcttgacaagtaaagttttaaacaaatgttttttactatcccactcttgtgggaattgttatagttatgctactatttgtgataaaactatacactgtggcacccacaatgtggaattctggttgtaaaattctaattcgtgctcctatgagaatctaatgctggggcttatctgacaggaggccactcacgcagtaatgcttacccactgctcacctcctgctttgtggcttctttcctaacaggccacggattgttactgctctatggcttgagggttggggacccctgctctagggtgtatctctttcagggttccaactaaaagcctaactctctctcccacttggcagacaacaacctataatttttgtatcttcagatccacaagactgatagaagttctactctgccaccacctaagaatcaacttctaatttatgatactattttaatttccccaattgtacaaaagcatgtcctttatagctgttttaaaatccattatccaatcaggtttcatgcactttggtgctatacttctttggtctcttttaatctagaacattctccctgccttgttatgacattttttgatgctttttgaatttttgtcatatataaggctccaaaaatgaaaatgagcttggtggtatgaggaattgaaaagaggtcagtatatcaggcatttcttgcaccacgtgttatcctctcagccccacctcttcatccagccattgctaaggtgaccaggtccagacagttgttcactagcttcatgcaggtacacactgacagtgcctctccttagtatctatctttccagtaccttcctctttccagcactgggcttctttgagatggtagaataggacttttgcagaaatcctctcagcacccatgcatttgcaaaccaaagttgtgggagacttaatgccaacaggatgactttttaacaactggggatgggggcagatggataaatacttcctttcatcttctgggcagagagtactaagaaacatttcttatttggtcggggtgagggtgaaaaccaagcttatgccagaaaaagtcatagaaagcagctggaccctcatactgggaacctaaatctcttattgggcagatcactgtaaagatccattgctggtaagtgaagtagtgattacccatggcatactaagtatcacaattactaagtattgcttggtattacaattacgagttcacaatgactaagcatagtcgcctgtgtgttcttggcaggaagtgctgagagaaggtgaagcactggactccagaagctgtggcactagaatggtaggggtacaatgggaatcataggattctggaagtatttggtttggttttaactgcattggaattatttttacaaaaagaaagaaagagctgggctcagtggctcacgcctgtaatcccaggctgaggctggtggatcatgaggtcaggagttcaagaccagcctgatcaacatggcaaaaccctatttctactaaaaatacagaaattggctgggcgcagtggctcatgcctgtaatcccagcactttgggaggccgaggtgggcggatcacgaggtcaggagatcgagaccatcctggctaacacagtgaaaccctgtctctattaaaaatacaaaaaattagctgggtgtggtggcaggtgcttgtagtcccagctacttgggaggctgagggaggagaatggcatgaacccaggaggcagaggttgcagtgagccaagatcacaccactgcactccagcctgagtgacagagtgagactgtgtctcaaaaaaaaaaataataatacagaaattagccaggcatggtggcaggtgcccgtagtcccagctactcaagaggctgaagcaggagaatcgcttgagctcaggaggaggtggaggttgcagtgagtcaaggtcacaccacttaatccagcctgggcaacagagcgagaatccatctaaaaaaaaaaaaaaaaaagaatgaatgaatgaatgaaaaaaggagagggacttattcatgctcaccaactaccaattaaaggcacactttgaacactagatgttcctgatgatagcatttaaagaaaccctcacatcctgcaagcacagggaagagagtgctgagtgctgaaacccatatgtaggatctaatttctaaaaacatggcataactgcaaaggaaactggtggcatggtcttaacaaatgccagattacaaagtgaatgctctgatagttggataactcagcttcctaatatcataacttgctttaaaaaactacagtaatcaaaatgcattcataccagcttaaagataagcctatagaccagtggaacagaattgagagtcaaaataaatctaaacatccatcgtaagttgatttccacaagggtgccaagatcattcaatgtgggaacaaattgtctcctgaataaatggtttttggtttttgtggggttttttgtttgtttgtttttaacttttattttaagttcaggagtacatgtgcaggatgtgcaggcttgttatacacgtaaacctgtcatggaggttttttgtactgaatatccacatgtaaaagaatgaatctggaccctcaccttatactatatacagaaattaactcaaaatggatcaacaacccaaatttaagagataaaactgccaaatatgggccaggcatggtggctcacacctttaatcccagcactctgggaggccgaggagggtggatcacgaggtcaggttcctggctaacacggtgaaaccccgtctttactaaaaatacaaaaaattagcggggcatggtggcgggtgcctgtagtcccagctactcgggaggctgaggcaggagaatggcgtgaacccaggaggcagagcttgcagtgagccgagatcacaccactgcactccagcctgggcaacagagcaagactccatctaaaaaacgccacccttgtatcttaaagtccctcatgactgtactactctgtgcaggccctccaagaatgcggtgttgcttttgctttcctatttttgtaggtggaagcagctctaatggcttccattgccctttcctactatcacattcctccctgcacaggtcagacaaccaatgtgggattctgccatttgctgagtgtgtccattccacttctgcaacctgacactgagcaaataagcagaggatggatgtggggccaactgggcagtgccaggtgcttccagtgctttcactttcacataattccagctgaacttggaaccgacttaaaaacaggatttgattcccctttcacttctacttatgaagacatcaatagatttccaggaaatcccacgtggagaggaaactgattttgtaattcactgcttgagtctgatgcatactctctagttagtatttcagacacaaatcacaggaacaatatttgctgcttgaggaaacagctatgaagacactgagagtagatacagagtgtcttgcctgccctaggtgaactggcaggaaataagaatctctgtgtccctggttgctttaggaaagtagaaacctatagagactaggagaactttctataggtgtgagaaagtgtgtgaggaaaagaggaggatagtggacagcatagagatttctggactgagacgggatttcgggcgtgaataactgagtgagtagcagcgtggaaggggctgtgtctgagctgagcagggctgagtgggaactgcgctctctacactgaaacagagtagggacctcatgggggctcccttcccctatttggactccaaagtgcacaggtgcctccgctcgaccaggaaaaagaagagggaaattcatatgctctctgccctcagttcaggaatgggggatgaaccatcccatttctggaaatgttgagacccagacttagcaaaggctaatttgttgatttaaagagtgctcatagatgaccatgcccttctaccatcctcctttctgacttagaatgggaaaagtcatgtcatagaggaggagctgtgggctcaaatagtggacaaggcagtcagtactttgcagagtgtcaatcttggtcagagatggatgcaaggcaaaccctttgaccagggcacacaatgacatggcttcatgagaagcatggaggctgaagtgcacaacttcccaccctcactccatcatcctcatctgtgccttccctggcgattccctgccccttggtgtgaccctccgtgtcgtttctgctgcagcacagtcacaggcctgaaaactgaaactgagtctatttctgccacccctactcacgctgctgagaaatcttcctggcaggggttcagagaaagaaataaagccagagggcagggccaagagggactatttaagtgctgcaaatcagagactcacacagaagaccagatactattctgaagaactacacagagggagacaacaatgtcatcactaaaagtaagtcaaaagacacagcctttaataaactcaattcacataaaccaagaaagaatcaggggtgatttcacaagacgaaagtatgagagtttctcttgtgaacactttactgagagttgtgggtgtgtgaaagagaaaccgtgcggctatgatatctgagatgctggtggagtgtggggtgtggactctgaaccagtgtaaccgtctgtgagtgcatggtggtgtctgatgagagtaacctctgctgagatgatgtgactttaggtgggaggtgaacagcccaccagggtgggcgggtgtgtgcctgagtgtaagggtgtaactgcgttttgtcttcttgactgtgatgtgagtgtgtgtgtgagcacagctggaccagtgtgtgagcatctttatatgcacagtgagcaggtgtgtgagactcagtgagtggcatggctctgtgagactatgggtgagtgtgtgctgggatgtgactgggtgttgaactgggagcatgcaaggggccttctgtgcatgtaaagtttcctcccaacacagcagcgcctctgatgaagcagctgggcacttcccatgtgtcagtgtgtgtcccatgtgtgaacagtgtgggtggcagaactggtgcgcctgttgtgagccatgagttatggaggagtcatctctgagcagaatgcgtgaatcctcaggtgcctcctcccaagcagagtggggaaaaggaacacagactatggggccgatggttcctcaggtggggtctgtccagaaaggccatctgctcctgcctccagcctcaggtctctctgtctcccagcctgtccatcccattgtgggagaagagggtgagcagatcctggctcactagggaaggcctttgggggatgtgggttcggagactgagtcgcccaaaatagagaaggaatcagtttattcttagttcatacagagcttacagtgcatattaatcaataacttgccagggtttgtggctcatgcctgtgatcccagtggtttgggaggccaaggtggaaggatcgcttaaggtgaggagtttcagaccagcctgggcaacgtagtgagaccctgtctgtacccagaatttaaagattatccaagcatgttggtgtgcaccttcattcacaactactcaggaggttttggcaggcggatcacttgagtccaggagtttgaggccacagtgagctgtgaccatgccactgcaatccaggctgggcaacagagtaagatcctgtatcaaaaagaccccaaaccccaacaccaaacagagaaatgaaaatcaaacaatatttagattacctccaatgacttccctggcccacactcttcatgtgtgcaggtactggggctgtgctgccagcaaggtgtccccttctggaaaggacgtccatggcccttgatgattgtgatgcacacgggggtttccagttcttttagcatttctctctctctttcaacaagtgttgtttctcactggagtgaatctctctactcttacatcctcacatcttgttttcacagcttcagtgttgaaaataatcacaggtcggtgttccagaagcaacctccctgttctaatgggtaacccccaacaggcttcatgcatggcagagattagggcaaaactttcacatatattaattcatatattactggaaaaaccctacaaagcagaaatttctgcttatcctccttgtcctggggaaactgaggcagggagcgttcaagtaatggatctaagattgcactgctagtaagaggcagaatgaggactggaaccaaggcagcatggatcctgaaccattgctctcatgtatgggtcactaatttcttcaggaatatgccgccctgaccgctacggtgggagggaggaggctcacagtttgccctttgacctctagcctcctgcaccataggaatctgttacgggggggaggccacacctggtcctgcccctcccacccactttcaatcccctggcaggtaccacacacacggcctgtgtccttgtctactggttcttgtgtgataatcacagggacaccgatcatccctttcgtgtgagtactccatggtccatggcagggggaggagacgaaagaacatttgctaaagggctgacctcctgtgtgagtgatgtgaaaatgtctagttggcaggatggcagcaccatgcaggtgcaggtcctggagaccctgcaacacctggcatgaaacctgcagtggccgcactgtgagctagtcatggggcctaggggaggaggacactcagggcattgggactgtggctctttatcaagaggcatagaatgttcaggaaattgacaactcataggcctaggtcagtgactgtggctgagtttacatcttgggatgagggagctcttaagggcaggaggggctgaagcagccccacagggacaagactggcagtatcaccaggaaggcctgtgtctgctctggggaaaggggggaagggatttgtgtgtgtccagtgtgtgccccacaagggagagacctgcccaacacaccgtgtgctttaccctcagcatggacccacagctgcaggtggatttccataccgagatgaaggaagactcagacatcgccttccatttccgagtgtactttggtcattgggtggtcatgaacagccgcgtgaatggggcttggcagtatgaggtgacatgccacaatatgccctttcaggatggtaaaccatttaacctgtgcatctccgtgctggccgatgagtaccaggtgagccccccaggagctcccagcacccaccctccatgggctcccagaacaggaggcagctcttcctgagctgaccccaccagttcctcggagccgatctcccataactactcctgccccaggcttttcctcacagagcactctctgcttgcactgccatcctcagttcttcttccagatctgacccagggtcaaggtgggctcacctgccattttccccaaggtggagaatcttgtctgtcttcacccatagttctcattcccatgtatgctgttacttacatagtcattcagccaaatggataaaacatgcatatgaataaggttattttatcagtccaaaatgtagtctttctctcagtactgaaccccaatcctacccccagaacagcagtattactagcttctctacacaaattccagagctaatgtatgcttatggaagcatacagatgtgtggtttcatttctttttaaaccaatgctgttttaagtttctctacacattacactttagaaactggggtggatttgttgtcaaacgctacatgttggagcaatcatccatccatggtgccgcctcagtttttcaacatcatacaatattcctgtagcagggttacccaaaattattgaacttgatccttttgatggacattaggctggttccagtattttgcgctcacaaataaagctttttaacgtaccctttgtcataatgaacctcccaatttccatattggagggtaattacaaaaaatggaataactccttcaaaattgtgtgcattttaaatttcataacttaacacctaaaaggtgactgtctctatagctttagtaataaataaatagtatttccaaactttctaaccttttcttcttcttcttcttctttttttttctggagatggagtctagctctgtcgcccaggctggagtgcagtggcacgatctcagctaactgtaacctccacctcccaggttcaagcgattctcctgcctcagcctcctaagtagctgggaatacaggtgcacacccaccacgcctggctaattttttttttgtagttttagtagagacggggtttcaccatattggtcaggctggtcttgacctcctgaccttgtgatccatctgccttggcctcccaaagtgctgagattacaggcatgagccactgcgcctggccttcttcccaatcttttcaaatgggcagatgcaaagagtaacatttcgtccatatttaagtaggagatccttttcttatgcctttcagccgttcagaataatatcctacgttttgcaacacctgttttgttcctcctctctgaaaacatttgaatttccttctttgccaccaccattacatctctgggcaactccaaggagaaactgggccatcagcagtcatagtgaatgggagttatagttcatggaactgaaatgtatgcattcaatgaacactgtccagcactaaccccatggcaggccctgtgcaagacgcaaggattgaagttcatgagagacagtcccaggccatagggatcttccaggtgagaggagaggctgagcaaacaggttctgtgatacacagggtggtaaaacctccttggaggaatgagaggaagcattggaaataaatgagcaactgtctgaagtaggcacaagggtaatctgcagagagaagtgtgtctactgggttctgatgtataattaggggatttctggttggatgctgtaggcactagggctgagtgagatgatgctgaaaacttgtttgatggcatattgtatttctgatgcatttttttcttttgtaggtaatggtaaatggccaaaatgcttacagctttccccaccgactcccaccatcttatgtgaagatggtgcaagtgtggagagatgtctccctgacctcagtgtctgtctgtaattgatgaaatgatcacattcctcatggttaaagaatccctgtttctgtgcgaccatggcatttccagagcctgctaacagaacgatcactcctcaccccttcctctacacttggtcattaaaacttcaccaaattttccagaatctggttcttactttcatggagaaaaagacaaagtggcacaaggacacaagtgacacaaggccactgtgatgtctgagattacataacgaagacatccttttatgtcagcccgtactttacgtcagacactctgaaccaaaattcctccttcattgtagatgactcactccagtgaaatgttgggtagctgtttacaacctcacaggcataattgattttggggagaagctttgtaatttgaggaaagtcatatgaaatgtcttcattcttgcactcattctaaggatgtttcctgtgtcttaatactgtgtctggcgttgtgcaggaagcactgaaaaagccgaggaaatactgaccaagtttgcacctgaaattttgttttgttgttgttctttgagacaagttcttgctctgtcattcaggctggactgcagtggcaccattaaggctcactgcagcctcgacaccctgggctcaaaaattcctcctgcctcagccccccaagtaggtgagaccacaggtgagcaccaccatggccagctaatttctgcatgttttttttgtagagatggggttttgccatgttgcccaggctggtgtcgaactcctgaagtcaagcaatccagcaacctcggcccaccaaattgctggcattacaagtgtgagcccctgtgcttggcctatacctgaaaatttcaatccaagccatagttagagaaccacaagagttcaataatttccctcaaaaaatccctttgtcatgttcaaaagaactgccagatttttctattttatgtgggcagaatcctggatctcctctttggaaataaatggtcatagttttagatcggaaaatatgtcatttattggtggaatgaacacaattcattcacatggacacagtgagccgaccctgctttgctgctgctaccgttggcattgcagaaccggaaacctccccaacacatattcacataaagcaaccatttattctgatgtctccctgctttgcaggtttactggactcatgcgggtggtagacacgcatgtgtgtgggagtcacgttttctgaaggacctacaggctgggatcccagaggattcttcacttatgtttgactcaacactaagggtgagtgaacacctgggggctggctggttgtctccttccctacctcccctacacattagtgtcttgaattttctgaaatcatgaaggcctcatagttgttggacttaatcaatgattactgtcttccaccaaagaaggactttcaagaaaccaaagaagaagctgccaggcatcatagaacttagctttgaaaattggagagtgtcacttttctatgacattatattgattaaggtgagtacagacagcccaaatcatggggaggggcctccacaggttgtggttgttttgattattggtcatgatggggtcctttttggaaccaagttccactgagtctccactggcttacagactgttcacataccaagagaagtaaccctggaaacaactccagaaagcaataccattgtaggaagaggctcagagtgaagtcccgcatcttatcatccaatcaggacctggtgtccatgaggtgactacacattgtcaggtgcactttctctcaatgtgtgcactaaggagacaaattattggcccttaacacatcaaacacccaatactgaaacacacataggaaaaatgcaattcacacacctgatttaagcattatttgaaaaagaaaagaaaaagaattttacatcaaaaggacaagaagatttttaaaaggagaatgaattgaagagaggaagaagaaaatagacagcagtcactgggccacatcattgctgaagccagccagacacctatttatcattttctctaggactggttctcagcaacaatcggcttcaccctccactcttcccttcttggagtttctaccaagatggcagaatgacagtccttttccctctataagagctgagatcacctgcttcatagcaaacctggagaaccacttagcagaaacaacatgttacctacaaactaatgaaggcagattgagtaaagtcctgtcaaatagcctctttttccacacggcccaagtcaggcatcattttgatcatcctcatcctctctccccatgttcattgccgcagtttgttcacctccaaccttactcatgggtatgctcctctcctacccgcattcaacctaacacccagatacctgaggtgccaacacacagccagtgctactcctcattcctttcttccacgtttcattcccatatggaatgaaattccctcctctctcactggacactcttgggttcagtttaggtccactctcctccttacacctttctgctctcagtgttgttcacttttctattttgataataggtcataggcctcatcacctgtatggaattcattttttgtggaattttagaaggtgacactgaccttatcaggggctcaccttcagcctagcacctaaatgtgcagaggcaagtggacaaaaaggaactgggaatagagtccaggcttcactcagtacctctttgtagtgacagcagaaagagtagtatgggtggtgggtgtgagatgttgtgtcacgggaacggagaacaggaagtgtttcctgggcactgagaagtgtctcctgtctcacggtgacctcttccccagcacagtttagctgcagaatacacactgttgtcctcagcacatagatcattctcaaagatagaccatatgttgtcatgaaaccagtcttgaaacattaaaaaaaaattgaaatatgtaatcccagcactttgggaggctgaggccagtggatcacgaggtcaggagatcaagaccatcctggctaacacagtgaaaccccgtctctactaaaaatacaaaaaattagcctgggcgtggtggtgggcacctgtagtcccagctactcgggaggctgaggcaggagaatggtgtgaacctgggaggtggagcttgcagtgagcagagatggcgccactgcactgcagcctgggcaacagagcaagactccatctcaaaaaaaaaaaaaaattgaaataatatcaagccacttctttgaccacaatggaataaaacaagaaattggtagcaagaggagttttggaaactatccaaatacatagaaattaaacagtatgtacctgaatgaccagtgggtcaatgaagaaattaagaagaaaattaaaagttttcttgaaacaaatgataatgaaaacataacataccaaaatgtatgggatacagccagggcagtataaagacggaattttatagctctaagtccccacatcaaaaaagagaaaagcttcaaataaacaatataatgatgcatcttaaagaattagataagcaagagcaaaccaaacttaaaattagtagaagaaaataaataataaagatcagagcagatacaaatgaaattaataaaaagtgttttttctgataatttaaacaaaattagcaaaccttagccagactaagaaaaaagtagagaagatatagataaataaaatcagaaatgaaaaaaagacacattacaactgataccacagaaattcaaaaaattattagtggctactctgagcaactatacaccaataaattggaaaatctagatgaaatgaacaaattcctggatacttacaacctatcgatattgaacctggaagaaattaaaagcctgaacagtccaataataaataataaaatagaagccacaataaagtctcctcataaagaaaagcccaagacctgatgccttcactgctgaattctactgaacatttaagaaaaaattaatgccaatcttaccgatactattcagaaaaacagaggagggactattactgaactcattaaaagaggccagcattatcttgatatcaaaaccacacaaaaacccaccaaaaaaggaagagaaaccataggccataggccataggccaatatctctaataaatattgatgcaaaaatcctaaacaaaacactagcaaacctgaagggggcctgccccttcacacctgtgggtatttctcgcaaggtggagatgagagactgagaaaaggaaataagacacagagacaaagtatagaggaagaaaagtgggcccaggggaccagcactcagcaagtgagacctgcaccagcactggtctctgagttccctcagtatttattggtcactatctctacaatcttggtgagggagatgtggcaggactatagggtaatggtagggaaaccattaccaaatcagcaggaaaacatatgagcaaaggaatctgtgtcataaataagtttaatgaaaggtgctgtgcctggatgtgcacgtaggccagatttatgtttaactttacacaaacatctcagagcagtaaagagtagcagagcagtattgctgccagcatgtctcacctccagccatagggcggttttctcctatcttagtaaatagaatgtatggtcaggttttacactgagacattgcattcccagcgacgagcaggagacagatgctttcctcttatctcaactgcaaagaggccttcctctttcactaatctccctcagcacagaccatttacaggtgtcaggctgggggactgtaaggtctttcccttcccatgaggccatatctcaggctgtctcagttgggtgaaacctggacaatacccaggctttcttgggcagaggtccctgcggccttctgcagtgcattgtgtccctggttaatcgagaatggagaatggtgatgacttttaccaggcatactgcctgcaaacaaattgttaacaaggcacatcctgcacagccctaaatccattaaatcttgattcaatacagcacatgtttcggtgagcacagggttgtgactaaggttacatattaacagcatctcaaagcagaacaatttttcttagtgcagataaaaatggagtttcttatgtcttcctttttctacatagacacagtaacaatctgatctctctttctttgccccatacaaaccaaattcaacaatacattagaaaggttgaccaggcatggtggctcatgcctgtaatcccaacactttgggaggctgaggggagtaattacctgatgtcaggggtttgaaaccagcccgaccaacatggcaaaaccctgtctctactaaaaatacaaaattagtcaggcgcagtggtgagcgcctgtaatcccagctatttgggaggctgaggcagaagaataacttgaacccagaaggcagaggttgcagtgagctgagatcacaccattgcactccagcctggatgacagagcgagacttcttctcaataaaaaaaaaaaaaaagaaggaaagatcatttatcatgtccaaatgggatttattcctggaatgcatggatggttcaacatatgcaaatcaattaatatgatacctcatatcaacagaatgaagaacaaaagccatatgatcattttaattgatactgaaaaagtgtttgataaaatgcaacatttcttcacaataaaaaccctaaaaaaattcgtgatggaaggcccataccttaaaataataagccatatatgacagacccacagctagtgtcatactcaatgaggaaaacctgaaagccttttgtctaagctctgaaacactacaaggatggccgttttcacactgtcattcaacatagtaccagaagtcttagctagaccaatttgacaagagaaagaaacaaagggcatccaaattggaaaggaggaagataacataatcttatatttggaaaaacctaaccactccacaaaaaactactagaactgataaacaaatttggtaaagttgcaggatacaaaatcaacatataaaaattagtagcatttctacatgcaaacaaggaacaatctgaaaaaggatttaaaaagctatcttatttacaatagccacaaagtaaattaagtacccagaaagttacttaacgaaagaattgaaagatatctgaaaaagtctaaaaaacgaatggaagaagttgaagaggacaccaaaatggaaaaaaatattccacgttcatggattagaagagtcaattttgttaaaatgtccatactaccaaaggtaatctacagattcaatgcaatctttatgaaaataccaataacattcttcacaggtgtagaaaaacaatcctaaaatttatatgaaattataaatgactgagaatagccaaagccatcctaagcaaaaagaacaaaactggaggaatcacattacctgacttcaaattacactacagagctatagtaacaacaacaacaagaacaactacaaaaagcatggtactggcataaaaacagaaacagaccaatggaacagaatagagaacccagaaacaaatccacacacctacagtgaactcattttcaacaaaggtgccaagaatatacactgggtaaaagacagtctcttcaataaatggcataggggaaactatgcagaagagtgaacctagaaacctatatctcctcatgtacaaaaatcaaatcaaaatggagtaaagatttcaaactaagatctcagactatgaaagtactagaagaaaatacggggataaatcttgaggacatttgttctggcaaaaatttcttgagaaataccccacaaacacaggcaaacaaagcaaaaaaaacgaacaaatgagataatgttaagttaaaaaactgcctagcataggaaacaatcaaaaagtgaagagaaaacccacagaatgggagaaaatatttgcaaactaattgcctgacaaaggattagaatggtttgaattccttgacaaaaaaaaagtgaagagaaaaatgaaataagagggagaaggaaggaaggatggaaggaaattctaattcactccacatttgaattctaatataggttttaaggatgcttcctttcatcacaaaaagaacttgaggaggggtcctgagtcctccaccccaggtgaagaagactgcattgtgactcaagtccaatcacctgtacctgcacctgtcctcacacaggtctggaactaagaaacaaataaccaataactagacttaagaatctcaactttctccacaaatttgcaggagaaagggtgtctctgaaaatttggattcccatggacgctcagagaaaagaaaagggtgtgggtggagcccaggtgtgtgagaggcagatgggaaagaccctcacctggcaaagccaaggggaccagtgtgggatcagggggacacaagggctttctctacctccctccataggtcctgcttaggatcaagaccagtgttctgtcagaacatctgtagaccaaaagaagtgttacctcccagggcaaatgattttcaccaaaatcctcactatttttaccattgcacagattaggaaaattaggaaatgtacattctgcacagtggagagaaggcttaatgagaggcatgggggctggacttcacaacccctcaccctcatcctcactccatcatccttgtctgtgcatttccctggtgaccccttcctccccctggtgtcttccccaccgtcatttctgctgcatcacagacacaggcttgcaaaaaagtgtggttatgactgagtctgtttctgataccctggggctatggtgtctgagacgttgcatgttgtcaggtgtggaccctggaccagtgtaaccttctgtgagggtgtgatggtgtctgatgagagtgaactctgctgagatgatgtgactttaggtgggaggtggagagcccaccaggatgggtgggatgtgcctgagtgtaaaagggtgactgttttgtcttcccgactgtgatgtgagtgtgtgtgtgagcaaggccagaccaatgcatgagcatctttataggcacagcgagcaggcatttgtgactcagtgagtggggtgactctgtgcgactatgggtgtgtgtgagtgctgggatatgactgggtgttgaactgggaacatgcatgtggccttctgtgcatgtcaagtttcctcctcacacagcagggcctctgatgaagcagctgtgcatcttcccatgtgtgtcaatgtggatgccaggtggcagaactggtgtgaatcttggggactgtgagttatcaatgactcatttgtgagcattaatgagagcagaaagcatgctctctagatgcctcttcccaagcagagtgggaaagaggaatgcagatcataggagtgatgtttcctcaggtaggttctgcacacagtgaccaccatctcctgtctttcagcctcatgtctcttcctggctcccaccaaagcctgcccttcttattgtgggtctggagagtttgcagatcctggctctctaaggaagagcattagagtctgtggtttcggatactaaatcaccctaaaccaggaaggaacaagtgtagcctcagttcagacagagtttacagtggatattaatcatcagagtagctgggttcactggctcatgcccataatcccagcactttgtcaagcaaagatgggaaaataacttgaggccagaggtttgagaccagcctgggcaatatagtgagatgctgtgtttacaaaaacttttaagtatcagacaggcattgtggcaggcctctttcatcacagctactcaggaggccaaggcatgaggatcccttcagcacaggagtttgtggctttgtgagctattggtgcaccactgcatgtcagcctgggtgacagagtgagatcatgtttcaaaaaggaagaaaaattatacacttgtaggttctctctaattacttccctgacccacacttttcatttgtccaagtgctggagctgtgtcctcaagatttttacaacttctgggaaggacgtccattgcccttgatgactgtgatgcacgtgcatcccacacacaggggttttctgttctttttcaatttccctctctctttcaacaagtgttgcttcttactggagtgaatttctctgctgttacatcctcaagtctagttttcacagtttcagagttgaaattgatctcaggtcaatattccacaaggacccaatccatagtgttaggtcacccccaacaagccctgtacatgccagggattaggctaaagattttacacgtattaacttctgtcactaaaatcaccctacaaagtaagaatttctaataaagacaaaaaagtaaaaagtaaagaaagcaaagaaaaataagagttttaaataatcctcctggtacctgggaaactaaggtaggcagcattcaagtaatagatctaagatggcacttccagtaagaggcagaatcaggagtggaatccaggcagcctgactcctgaatccttgttcctaactatgggaccctcatgtcttcaggaatatggagtcctgactgtgatagggtgaaaaagagaagtcctcactgtttgcctgttgatttctaaccttctgcatcatgggaatctgttagaaaaggggaggccacacctggccgggcccctctcacccactctcagtcccctagcaggtgccccacacaatgcctgtgtccttgtccattggttctaccatgacaatcagagggacaccgatcctcccttttttgtgagtactccatggtccatggcacgggggtggaaaagaagggagaatatttactcaggaagtggcctcatgtgagtgatgtggaaatgtctagttggcatgataaaggcaccaattaagttgcaggtcctggagaccctccagcaccaggcatgaaacctgcagtggttgcactttgggccagtcatgtggcctaggggaggaggacactcagggattgggggtgtggctcattatcaaggggcatagacttttcaaagaatggacaagtaatagctcaggtcagtgactgtggctcagtttccatcttgtgatgagtgacagagcatgtccccacctgggggaatgaggtgctaaaacagccccacagaaaccagtcctgcagtatcaccagggagcctgctttcttctttggggaaaggggggaagggatgtgtgtgtgttgagtgtgtgccccacgagggggaggggcttgcccaacactctgtgtgctttgccctcagcaatgacccagagctgcgggtggaattctacactgggacaaatgaggactcagacatcgccttccatttctgagtgcactttggccattgtctggccattgacagccatgtgtgtagggcctggaagtgtgaggggagatgccacaatgtgcccttttaggatggcaagccatttgatctgagcatcttggtgctggacaatgaataccaggtgagtgccctaggagctcccagtacccagccctccatgggctcccagagcaggaggcagctctccctggcttggccccaatagtccctctggacccacctcccataactagttttgctttgggcttttcatcaaaacgctctgcttgcgccatcatcctcagctcttttcccaaatctgaccagggtcaatatcagctcacctcgcatttcccccaaggtggagaatctcctctatcttttcccattgtggtcacttccactttatgctgttatttaaatttttcacttcgctgaatgaatacaatattcctaaaaataaaattgttttagtcaatcaaaaattaagtctatctcattcctggacccaatcttactcctgagaacattaccagtgctctgttctccttccacaggaaatctttgcttatggaagcatatagatctatactttcatttgtttttaagaaattcctagtatacattgctttacacattaccctttaggaactgagttaatttgttgttaaaaatatatatcttgaagacatcttctattaatggtgctgcctcaatttttaaagattgcataatgttgcattagagcaattacccaaaattattgaccttgactcttttgatgggcattgaggttatttccaatattttgctctcacagatggtgctgtaataagatttctagtaaattcttttgtcattatccacctctcttacttatgatgaaaaataatcagaaagaaatgaaataacaggttcaaaaatgtgtgcattttaaatttaacaaattgacacctagaaggttactttacagccttagtaataaagaatatgtccaaatgttctggctctttctaatgtgtagggcaaacgccaaaagattcacattttattcagattcaagtgagggatctttatctgtgcttagaagctgtttaaaatgatatcttatgttttgcaacacttgtccgattctacctttccaaaaacacttgaaatctattcttggccaccaccagcccagatctaggtaactccaaagagaaactgggccatcagcgtgagtggcagtcagagttcataaaactgaaagatatgcattcaacgaatatagtctagcattaatcctgtgtggactcctgtacaagatgcagggattcaagctcatgaaacagagtcactatctatgggggttttccaggctagaggggaggctgagcaaacatagaccagccttgctggaagtatgagaggaaaaattagaaataaagcaaacaactgtctcaaataggtacaaaagttgatctgcaaacagaagtgtgtgttttgagttcagttatataactaggagttttctcacgggatgttgtaggtactaggacagagtaaagaggaggctgaaagcttgtttggtggcatactgtctttctaatgcatttttccttttgtaggtaataataaatagccaacactgttgcagctttgtccataactcccaccatgttctgtgaagatggtgcaagtgtggagagatgtctccctgacctcaatgtctgtctgcagttgatgcagatgatcacactcctcattgttgaggaatccctctttctatgtgaccataggatttccagagcctactaacagcatgatctctcctcactgtttctgctacacttggtcattaaaacatcaccaaactaccgaggatttgtttggttcttgctttaagggagaaagagaaagtggtcattcccaggagggcccaaggaattctatgagaggcatcaagaaatcaaaaaggataagccttcgtgtgacttcaggagtgagtgacaaggtccctggaatgtctgagaagacattaggtacagcatccttctatatcacattgttgacatcagagactctgaaacaaaatccttactcaatctcagatgactcactgcactgaaatgttaggtagctgtttacagccacacaagtgtacctcagggaagaaatttggtaacttgaggacaatctggtggaatttcctaattccttccattgttctcaggatatttattgtgtataaacatggtgctttggtctgtaaagactgccatgcaggacctttaaaaagagacacatttctgacatgaaaattttaatccaaacaatagttagagaatcacaggagcccaaaaatttctcttaaagaacctcaaatgttgatgtttaaagataattgtgagttttttctgatgtatgtggcagaatccttagatttctatttggaaacaaatggtcatggtttaagtccagaaaatatgtagtttattgttgggatggacagaattcatacacatggacacagtgagcagaccttgctttgctgctgtttcactaggcattgcagcacagcaaacctcccaacacatgttggcttagagcaatcatttattctgacctttctcagttaactggactcatgtgagaggtaggtcatgtggtgagaatcatgttttccgaagcatctttcaggctgggattccagaggatgcttcactgatgcctgacccaacactagagctgggtgaacatctgggggctggctggttattttattccctacttcacctccccattcatgccttgaattttctcaaatcatgagagtctcatgattcttagacttaatgaatgataattggcttccactaaagaaagccttccaaaaggctcaggaagaaggtgcaaggcatcataggacctagctttgaaaggcacacagtatcagtactgtgacattatattgatcaaagtgagctatacagacagcccaaatcaaagggtggggattccataagctgtggttattttgacctgttgtcatgagggagcatttttggcaactattcccactcattcctcagtggcttaaatgctttccacattccaaaaacactatcctgtaaggaaccactgaatgcaatatgattacagaaacaggctcagattgaagtttagagtcttatcgtttaatcaggatctggtgtccatgaggtgactacaaattatcaggtgcactttctctcaacatatgcattaaatgaatacattacctcccctatacaaatcaaacatacaagactgaaacagatataggaaaatgcagtggacacatctattttagaagggcaaaaaataataaacagcaccctgaaagcaagatggtcaccaatagctctactggagctacccacgaaaattcagccagggttctcactcttgttacatctgctcaaaccagcatggccttatccaaaaatactgtcttgatgtgtgccgcttgtgtttccataagtacttaaaggatatatttttcattaagttggactaagtgatcttccttgaattgatatgcaagacttacatccaatgaaagaaactgtgctagcacattaaacatgaatagagattaaaacaaagaaacaaataaaaacaaacaagaacaaaaaagaaaataggcagcagtcactcgtccacattattggaccctattttcatcttctctgaaagtggttccctgtgacaattggctccaccatctattgtcagtttcttggaactcctaccaagatgacacaatgacagcccttttctcgatacaggagctgtggtcacctggttcatagaacaaaaagagaaccacttagaagataaacagcaaattacctaaaagccaaacaatgcagattgaagagggtctcatcaaatagcctctttgtcagcagggcccatatcaggtggcattttgatcatcctcatcctgtcttcccatgtttattgccgcagcttgttcaacagcaaccttactcatagatatgcctctctcctttccctcctttaacctaacatccagttaccttgaggtgtcaatgcacagtaaataatacattcatgcctctcttttttgtttctttccagtataagctgaaattttctcccctctcactggaaagtctcaggttcttgttaggtatactcacctccttgtatcatcccactcacagttttggtcacttctctattttgatgatggagcataggcctcctcaccagcatggaagtcatttttgggcaattaggcaattcttgctcagagtggattaagactatcttggaacccataacccatgaagttttttttttttttgagatggagtttcactcttgttgcccaggctagagtgcagtggtgtgatctcgggtcactgcaacctccaccttccagtttcaagcaattctcctgcctcaacctcccaagtagctgggattagaggcatctgtcaccatgtccgcctaatttttgtatttttagtagagaaggggtttcaccatgttggccaggttagtctcgaattactgacctcaggtgatacacccacctcggcttcccaaagtgccgggattacaggcgtgagccactgcgcctggccagaacccatgaatttctgagcagaacatgagtttaatttcatatctatatgtccctggatgattccaattgtatttgaataacctacagggtcctacatgctgcctgtgctagacaaacacacagtgactgccttttcttaactgatattcaccagctcagttcagttcacataggccatttgttacactcatctttatactacctactatcctgtgctcatggtagccaggagtgatgtctcagataaaaagataacacatagagaccaggaagcaatgttcaacaagcaagttttgatttgcctctggggacctactcaacatctttttcatgctcctcaacctaaattcactaaatacagcattcccactaaatatagcattgctcaaaacacagaaggttattcttggactctaaagccttgccttctgaaaggtctggagggcttttcagtttttgctgaaagcccccaaagaataaatctagtctttgaaaatgtccttgatgcctaagtccaccaaagctgtttcctctggggtgctgtccgtgatgctgagcactggtgcttctaggcctgtatttgcaagtgaggggctaataaaacagaattaggagataaattttttgttttgttttgtatttgataaattgcagctcaaaatatgcatgatatatggagcaggaaatgaatttggattttcaaaccacaatttctgcaatgccttctatcaccacttttattcagcatagtatttgaagtaccagccagagagttcagcaagagaaagaaacaaatggcatccaaatagagaacaaggttaaaccatccatgtttagagatatgattctatatctggaaaacctcacagtttccacccaaacgatcgttaagctggtaaacaactttcgcaaagtttcagcatacaaaatcaatgtgcaaaaatcactagaattcctacatgccaaagacaacgaaccacagggccaaatcaagaatgcaattccattcacaatttccataaaaagaatagaatatctaggaatacaactaactgggaggtgaaagattgttacaatgagaattacaaaacactgcttaaaaaagtagagaagacccaaacaaatggaaaaacattccatgctcacagatagcaagaataactatcattaaaacaaccacattgcccaaagaaatgtacagattcaatggtattcctattgaactatcaataacattcttcacagaattagaacaatctattttaaaatgaatattttaaatattaattgaaccgagtgggttgaataaaagatattccaaagcaaaaagaacaaagctagaagcatcacattacccaacttcaagctgcactatagggccagagtaacctaacagcatagtacttgcataaaaacagacacatagaccaatggaacagaaaagagaggcaagaagtaaggtcccacacctacagcaatctgatctttgacaaagttgaccaaacaagcaatggaaataatttttggataactagctagccacgtgcagatgattgaacctgaaccactttcttgcgttatatagaaaaatcaactgaagatgggttaaagacttaaatgtaaaacccaaaactataaaaaccctggaagtctacctaggcagtaccataccgaatgtagaaataggcaaaagattcctgacaaagatgccaaaagcaatcacaagaaaagcaaaaattgacaaatggatctatttaaactaaagagcttctgcacagcaacagaacctatcaacagagtcaactgacaacctacagaataggagaaaatatttgcaaattatgtatctgaaaattgtctaatatctagcttctataaggaactttaacaactttacaagaaaagaacaaacaaccccataaaaaagtgggcaaagggctgggtgcagtggctcacgcttgtaattccagcactttgggtggctaaggtaggtggattgcttgagtccagaagttcaagaccagctttggcaacacggcaaaaccctatctctatgaaaaatagaaaaattagctgagtcttgtctcaggcacctgtaatctcagggactcaggaaggtgagctgggaggatcgcctgagcccaggcagaggttgcagtgagacgagatttcaccactgcacttcagcctgggtgtcagaccaggctgtctcaaaaaaagtagacaaagaacaggaacagatacttcttaaaagaagacatacatgtggccaacgagcatatgaaaagaagctcaacagccctgaacgttagaaaaatgcaaatcaaaaccaccatgggataccatctctcaccagtcagaatggctagtattcaaaagtcaaaaaataacagaaactggcaagtttgtgaagaaaagggaacacttacacatttttggtggcagtgtaaattagtttaatcattgtggaaagaaatgtgatggttcctcgaatggctaaaatagaactaccattcaacccagctatcccatcactgagtatatacccagaagaatataaatcattctaccataaaaacgtgcacatgaatgtttattacaacagtatgcacaatagcaaaaacatggactcaacctaatagctcataaaggacagactggatagagaaaatgtggtacatatacaccatagaatactatgcagcctcaaaaaagaatgagattatgacttttgcaggaacatggatggagttggaggtcattaaccttagtgaaccaatgtggaaatgaaaaacaaaatactgcatgttctcacttagaagtgtgagctaaatgatgaggcccatggataccaagagggaaacaacacacactgagacctacttaagggtggagggtaaaaggtgagacaggagcagaaaaaataactattgggtactaggcttagtacctggatgtgaaataatctttaccgcaaaccccatgacacgagtttccctgcatatgtacccctgaacataaaataaacgtttaaaaaacaaagaaaaaaaccaatgtcacctttcttctggaatctgcaggagaaacagtgtctctgaaactttgattcacatggacatcaagagaaaggagagagtattgctagagtccaggtgtgggacagacagatgagagcagccctcacctggtagagccaaagggcttagcatggggcaggttcatgcaaggacgttctctacctcccccccggatcatcctgaggatcaagggcagtgctgtcccagaatctttaaaggcaaaaagaacaatttaaaggcagaatgtatgatctgtaggtgtctctttccaataagtgtggggaagaggaatacagactacgggggtactggtcccttaggtgaggtctgcacagctggtatgcagtaccagctactcaggatactgagctgggaggatcacctgagcccaggagccagaggttgcagtgagccaagatggagccacaccactccagcctgaatgtcagagtgagacctgtcttaaaacaacaacaaaaggcgagaaaagacaagaacagagaacagatacttttcttttcttttcttttcttttttttttgagatgaagtctcactctgtcccccaggctggaatgcagtggcatgatcttggctcactgcaagctctccctcccgcattcatgccattctcctgcctcagcctcctgagtagctgggactataggcgcccgccaccggcccggctaatattttgtatttttagtagagacaggggacgcttctcaaaagtacacatacaggtggccaacaagtatataataaaagctcaatatcactgaacattagagaaatgcaaatcaaaactacaatgagataccatctcacaccagtcagaatggctcttcttaaaaagtcaaaaaaggacagatgctggcaagggtgtggagaaaaaggagcacttacagattattggcggtggtgtaaattagctcacccattgtggaaagcagtgtggtgattcctcaaagagcttataacagaactaccattaaaccccgcaatcccattactgggaatggtgtatacactactgtatacacagaagaatagaaattattctgccttaaagacatatgcatatgaatgttcattgcaacactgtgcacaatagcaaagacacagaatgaacccaaatgccatcaaggacagattggatacagataatgtgatacatatacacaatggaatactatgaagccctaaaaaagaatgagttcatgtcttttgcaggaacatggatggagctggaggccattatttttagcaaactaatgcaggaacagaaaaccaaatactgcatgttctcacttataattgtgaactaaatgatgagactcatggacaccaataggggaacaacacacacagaagcctacttgaggttggagggtgaaaggtgagataggagcagagaaaataactattgggtactacgcttagtacccaggtgaagaaatcatatgtaccacaaacctcatgacatgactttatctgcatatgtacccctgaacctataataaaagtaaaaaaaaagaaaaaagaaaaaaaatctcatctttctcccagaatctgcaggagaaacaatatctctgaaactttgttttacatggactccaagacaaagcagagaatgcagctagagcccaggtatgtgacagacagatgagagtgaccctcacctggcagatccaaggggcctagtgtgaggcaggttcatgcaagaactatctctacttctcttcccagatcctcctgaggatcaaggtcaaaaggatctgacccttaaaggccctcccagaacctttaaaggcaaagagaagaattaccttctaggtctaacgtctttttccaaaattcccaattttttatttttagtcattgtacaaattgaggaaatgtacaccttctggctagattctgcatactggagaaaaagcttgagaggcacaaaggctgggctttacaatccctacccctcactccatcatccttatctatgcatttccctggtaacccaatccacagcctggtacctcccccactgtcatttctgctgcattacagacacagacctgcaaacatctatggttgtgacagagtttctttctgacacctgagtctttctcctgctgcacggaaagcttgctgggaggggcttggaatctggcatgaagccaaagggcatctctgagttgcagcatttaaatgatcccactcagagattcacacagaagactggacacaattccgaagagctgcccagaaggagagaacaatgtcatcactacccgtgagttgaaaagtcacagccttcaataatctcaagtcacataaaccaagaaagaaacaggggaggttttctgagttgaaaatatgagcattcctactgtgaatgcattaccgagagttgtgggtgtgtagaagagaaaccctgaggctgtggtatctgagatgattgtgggtgtaggctgtggaccctggaccagtgtaaccctctgtgagggtgtggtggtgtctgatgagagtgaactctgctgagattaagtgactttaggtgggaggtggatgacccaccaggaccggcaagtgtgtgagtgagtgtaagggggtgagtgtgctttgtcttcctgtctgtgatgtgagtgtgtgtgggcacagccagaccagtgcatggtcatctttatgtgcacagtgagcaggtgtgtgtaactcagtgagtggcatggctctgtgtgactatgggtgtgtgtgctgggatgtgactgggtattgaagggaaaacatgcacgtggccttctgtgcatgtgaaggttcctccccacacagcagcacctctgatgaagcacctgtgtgtcttttcatgtgtggcaatgtggatcccaagtggcttaactggtggggatcttggggattgtgagttaccaaggactcgtttcagatcacttatgagagcgaaatatatcatcagtagatatctcttcccagtaagagtgaggaaaaggaacgcagattatgggagagatggttcctcaggtggggactgcacagagtgatcactggcttttgcctcccaggctcagcttccctgtcgctagcccagcctgttcttcccattgtggaacaggcgagtgtgaagatactgatttgccagggaagaatattagaggccgtggttaaagagacggaatcaaacaaaatatccactgtaagctctgtctgaactgagactaaacttgttcctccactcatgaaagaacaagctgtctgaattcagacagtgcttactgtggacattactcaacaaagcagctgggttcactggttcatgactataatcccaccaatttgggaggcaaagatgggagggtaacttgaggccagaaatttgagaccggtctaggcatcatagtgatatgctttctttaaaaatctttaaatatctgactggcagagtggcagacacctttcaccccagctacacaagagggggcagatgtgtgaggatcactgcagtccaggagttcgatgtttcagtgagctgtgattgcaccactgcatatcagcctgggtgacagagcaagaccctatctcaaaaatacagaaaaatcatcaaccacttgcagtcgtcgtagaaatcaatcattccctccagttatgtccctgacccacaggcttcatttgtgcaagtactggggctgtgctgtcagtaatgtgtgccgcttctgggaaggacgtccattgcccttgatgattgtggtgcgtgtacatcccacacacaggggtttcctgttctttcgtcatttccctttctctttcaacaagtgttgtttctcactggagtgaatttttaaattctttcaccctcaagtcttgttttcattttctgagttgaaaataaggcaggtcagtgtttcaggaggactcccctgttctgttaggtcacccctaattgaccctatacatgccagggattagggtaaaagttttacctatattaactcctctattactgagaacaccctacaaagtaggaattcctgatagtcctccttgtcctggggaaactgaggcagggagaggttaagtaatagatctaagattgcactgctagtataaggcaaaatgaggactggaatccaggcatccgggctcttgaacaattgctcttacctatggatccaccatatcttcaggaatatggggccctgactgtggtagggtgaaaggggagaggcctcagagtctgacctttgatctctaacctcctgcaccatgggaatctgttacataggggaggttacaccttaccctttagctctcactcactctccataccctggcaggtaccatacacactgcctgtttccttgcctgttggttcgtgcgtgataatcacagggacaccgatcctcacttttgtgtgagtactccatggtccaatggagggggtggaggagagaagggagaatatttgctaagggtttaaccttatgtgtgagtgatgtggaaaactctagttggcataatgaaggcctcatgcaagtgcaggccctggagaccttccagcaacagacatgagacctgtagaaactgcatgcaggccagccacggaacctaggggaggagaacactcagtgggtttgggttgtggctctttattaaagggcatagaattttcaggaaatgaacaagtcataggcccatgtcactgactggcgctcagtttttgtctggggatgaggaacacagcatctccctgcctgggggcatgaggagctaaagcgtccccacagggaccaggactgcagtatcatcggggagactttttgccctgggtaaaggggggaagggatttgtgtgtgtggcgagtgtgtgtctgcacaatggggggacctgcccaacatgctgtgtgctttgacctcagcaaggacccacagctggaggtgaatttctacactgggatggatgaggactcagatattgctttccaattccgactgcactttggtcatcctgcaatcatgaacagttgtgtgtttggcatatggagatatgaggagaaatgctactatttaccctttgaagatggcaaaccatttgagctgtgcatctatgtgcgtcacaaggaatacaaggtgagtacttcaggatcttccagcgctggagctctgtgggctcttagagcaggaggcagctttcattgacctggtgccaccagtcccttggggcccatcttccataactattcctgtttcaggttttcatcacagagcaccctctgcttgcactgccatcctcagctctttcccaaatctgaccaagatcaaggtcggctcacctgccatttcctccaaagtggagaatctcctctgtcttttcccatagtgctcatttctacttatgccatttttaaaattttcatttagctgaatgtatactatatacttaagaaaaaggtggttttaatcattcaaaaattatgtttcaattttgggcccaattctactcataagaacaccattactagagttctgctcttcttcagaaagaaactttttatttttttatttttttgagacagagtctcactttgtcatccaggttggagtgcagtggcgtgatcacagctcattgcaaactccaccacccagattcaagcaattctcttgccttagtctcccaagtagccggaattacaggtgcatgccatcacaccttgttaacttttgtatttttagtagaagaagagtttcaccatgttggccaggcttgtcttcaactcccgaccttgtgtgatttgctcaccttggcctcccaaaatactgggattacaggcataagccaccgtgcccagcctttcagaggaaatcttttcctatggaagcatgtagatatgtctatgattgcatttgtttttaagcaaatcctggtgtaagttgctctacacattacactttagcaactaagttgatttgttgtcaaagaatatatcttgaagacattatcaatccacggtgccgcttcagtttttaaagattacataatattgcattaaaaagtttacccaaaattattgaacttgacccttttttgggcattaaagttgtttccagtattttgctctcacaaatgatgccgtattaagttttatagtcaatcctcttgtcattactaatttcccaatacttatactggaagataattagaaaaaaatgaaaaaaacagctcaaaaatgtgtaaattttaaatttgaaaaattaacactaagaaggtgactttctctatagcctcgacataaggaatatatccatagtttccattctttttggctttctctaatgagtaggccaaaagattcacatcttattcagattcaagtgagggatcttttcctaggcttaaaagttgttgaagataatatcctatgttttacaagacctgtcctcctttaactctctaagaaccctgggtttcattctttgccactaacacctcagatgtaggctactccaaagaggaactgtgccatcagtagtgaaaggcagtcacagttcatggaactgaaaagtatgcattcaatgaacatggcctcgcactaaccctctggcaggtcctgtgcgagatgcagggtctcaagttcctgagacaccgtccctggtgatggggatcttccaggttggaagggaggccgagtaaacggactgtgtgacacggtgtataacttcactaggggaatgagagaaaacattagaaataaaatgagcatctgtctcaaataggcacgaaacatagcctgtaaaatcacagaagtgtgtctactaggttcacttgtgtaactaggagttttcatggggaaggttatttgtaactgggcagagaagagaaagggctgaaaacctgtttggtggcatgctgtctttctgatgcatttttcctcttgtaggtaatggtaaatggccaacgcatttacaactttgcccatcgattcccgccagcatctgtgaagatgctgcaagtcttcagagatatctccctgaccagagtgcttatcagcgattgagggagatgatcagactcctcattgttgaggaatccctctttctacctgaccatgggattcccagagcctactaacagaataatccctcctcaccccttcccctacacttgatcattaaaacagcaccaaacttcacatgattggttcttgctttaagaggggaaaagaggaagtggtcatccccaagagggtccaggacattctatgggaggcatcaggaaatcaaaggggataaaccttcctgtgacaaagggagtgagtgacaaagtccctggaatgtctgagaagacatcagaaacaacattcttctatagtaggtagttgatgtcagacagtctgaaccaaaatccttacccaatgtcagatgactcactgcactgaaatgttaggtagctgtttacagccacacaggtatacctagtggctgtgggcagaacctgtaacttgagggaaatcatgtggaattccttaatttttttcattgttctcaggatgcttattgtgtaggcacattgtgaagttttcaatctaagtagtagggaaatattggagcctagtgttttccttaaagaatctcaattattcttatttccaaatattcaaagatttttccattttatgtgtgcagaattaaggggtttctctttggaaataagtggtcatggttttagatcagagaacatgtagattattattggaatagacacagtccatgtacatggacacagtgagcagacgctgctttgctgctgttccagtgacaaattgtagcatagcacacctcccaacacatattgactaaaaacaatcattaattttgatctctgccagctttacaggtttattcaactcatgtgagtggtaggtcatgtgatgagagtcatttacagagaaatcttttaggctgtgatttcagaggatgcttccctcctgtccaactcaacactagggctggatgaacacctagaaactggtgggttatctctttcactaccacacctttccattcattccttgaatatgttcaaatcaggagagtctcacggttctcggacttaaggaatggtgattggctttcagcaaagaaagccttccaaaaggctcatggagacagtgcatggcattataggacctacctttgaatggcagacagtgtcacttctatgactttacattgagcaagttgagtcacacagagagccctaatcaaaaggagaggactccacaagctgtgattattgtgactgtagtcatgaggagccatctttggcaaccagtttcactcagtcgtaactggcttatatacttcccacatactaacaacactaaccctgtaaggaatctctgaagacattactataacaggaacaggctcagagttaagtgctgtatcttatctaatcaggatgtggtgtctataaggtgactacaaattatcacttgcaatctctctcaacatgtgcacaaaagggacacattatccgctttatacaaatcaaacaaaaaagacaaaaagagataggaaaaaggcaatgaacacacctattttagagaggcaaaataaaatagacagcagtcactaatccatatcactggtgaaaccaaccagacatctattttcattttctctgggaatgtttctctgtagcacttgtcctcaccctccattctcagcttcttggatttcttaccaaaatggcagaatggcagcccttttcccactgtaagagctgtgattatctgcttcatagcatgtatggagaaccacttaggagaagagaaacaaaatattatctaaaaatcaatgaaggcaggatgaagagagtcccaccaaatagcctctttgtttgcaaggaccatcttaggtgtcattttaatcattctcattttctctctccatgttcactgcaacagtttctgcaactccaacctcactcatgggtatgcctctctgcttacccctcctttaacctaacatccagataccttgaggtgccaacgcacagtgaatggcactcttcatgcctctcttccttgtttcttttcagtatggaatgaaattccctcccctctcactggaaactcttgtgttctgattagatacactgtcctccttacaccttccctgtcacagtcttgatcacttctttattttgataatgaattataggccctatcaccagcatggaattcatttttggggggaattgtgtaatttgtgctctgagtggatgcaaactatcctgaaaccactggcttcatgagcagaaaacgacttggatttcacatcaacttgccgcttgcctggcagtcattttatttgaataactgacataattttacatgccggccctgttaggcaaacacacagtgattgtcctttcttgaatgatattcaccacctcagtgcacttcctaaaggtcattcgttacattcatctttattcagctgctactctgtgttcatagtggtcaggaattacatcttagatacaaagagattacatagagtccagggtgaatgctcaactaataatttttgaattgcctctgaaaatctactcaacatttttcctcctcctgctcaatcaaaattcattgtcttctcccagcaaaaaggggattggtcaaaaagcagaaactctttaatgaactctaaagcctcctcatctcaaaggtcttttggtctttccagttataacagaagcccccaaagaataaatatactctgtgataataatgtccttgatgcctaactctctcagtgttgcgattcctctgggatgccatctgtgatgctactaaacattggtgtatgtgggcctctatttgcaagtgatggaccaagaagatagaataaaaaagaaatttaaaaaatttccccattttatttatttttaccattctttaacttttcttttaagttcaagtgtgcatgtgcaggtttgttatataggtaaaccccttgtcacaggtgtttgttgtatagattatttcaccacccaggtactgagcaaagtaccaatagttattttttgtgctcttctccctcttctcaccctctgctctcaaataggccccagtgtttgtcatttacttctttgtggttatgagttctcatcgtttagcttccacttataagtgagaacacgaagtatttttcttctggtcctgcattaatttgctaaggttaatggcctctagctccatctatgttccctcaaaagacatgaccttgttcttttttatggctgcataatattccatgatgtatatgtaacatattttctgtattcaatctgtaattgatggacatttatgttgattccatgtgtttggtattatggttttagtttgcatttccctgatgattagtaatgttgaacatttttttcatatatttattggcagtttttacatattttttgtctttgtactgaaattttattttatttttatttttttaactcattaatttagtttattttttcccataagttattgtgatacaggttgtatttggttacatgagtaagttctttatttgtgatttgtgagattttggtgcacccattacccaaactgtgtcatatttgtagtcttttatccctcatccccctccactcttcccccccaagtccccaaagcccatcatattatttttatgcctttgtgtcctcataggttagctcccacatatcattgagaacatatgtttgttttccattcctgagttacttcacttaaaataatagtctccaatctcattcaggttactgcaaatgctgataattcatttctttttgtggttgcatagtattccattgtgtgtgtgtatatatatatatacctacacacacaatggatatatatgtacctttttttaatccatttgttgattgatggacatttgtgttggctccacaattttgctattgtgaattgtgtcactagaaacatgcatgtacaagtattcttttcaaatattaacttcttgtcctctgggtagatacccagtagtgggattgctgaatcaaattgtagttttatttttagttcttttaaaaatctccacactgttttccatagcagccatactagtttacattcccaacagcagtatagaagtgtttcctgatcacctcatccatgccaaaatccttttttatttattattttttattatggccattcttgcaggaatgaggtggtactgcattattgttttgatttgcatttccctaataattagtgatgctgagcattttttcatgtgcttgttggccatttgtatgtcttcttttgagaattgtctattcatgtccctagcccgctttttgatgtggttgcttttttcttgctgatttgtttgagttccttgtagattctgaatcttagtcttctgtcagatgcatagtttgtgaatattttttcccactctgtgagtggtctgtttactctgctgattatttcttttactgcacagaagatgtttagtttagatagatctcatttatttattttcgttgcatttgcttttgggttcgtagtcatgaattctttacctaagccaatgtctagaagagtttttcaatgttatcttcttgaattttattttatttcattttattttaattttattattattatactttaggttttagggtacatgtgcacaatgtgcaggtttgttacatatgtatacatgtgccatgttggtgtgctgcacccattaactcgtcatttagcattaggtatatctcctaatgctatccctctcccctccccacacccatgacagtccccggtgtgtgatgttccccttcctgtgtccacgtgttctcattgttcaattcccacctatgagtcagaacatgcggtgtttggttttttgtccttgcgatagtttgctgagaataatggtttccagcttcctccatgtccctacaaaggacgtgaactcatcattttttatggctgcatagtattccaaggtgtatatgtgccacattttcttaatccaatctatcattgttggacagtggggttggttccaagtctttgctattgtgaatagtgcctcaataaacatacatgtgcatgtgtctttatagcaccatgatttataatcctttgggtatatagccagtaatgggatggctgggtcaaatggtattgctagttctagatccctgaggaatcgccacactgacttccacaatggttgaactagtttacagtcccaccaacagtgtaaaagtgttcctatttctccacatcctctccagcacctgttgtttcctgactttaatgatcgccattctaactggtgtgagatggtatctcattgcggttttgatttgcatttctctgaaggccagtgatggtgagcattttttcatgtgttttttggctgcataaatgtcttcttttgagaagtgtctgctcatatccttcgcccactttttgatggggttgtttgtttttttcttgtaaatttgtttgtgttcattgtagattctggatattagccctttgtcagatgagtaggttgcaaaaattttctcccattttgtaggttgcctattcactctgatggtagtttcttttgctgtgcagaagctctttagtttaattagatcccatttgtcaattttggcttttgttgccattgcttttggtgttttagacatgaagtccttgcccatgcctatgtcctgaatggtattgcctaggttttcttctagggtttttatggttttaggtctaacatttaagtctttaatccatcttgaattaatttttgtataaggtgtaaggaagggatccagtttcagctttctacagatggccaaccagtttcccagcaccatttattaaatagggaatcctttccccattgcttgtttttgtcaagtttgtcaaagatcagacagttgtagatatgtggtatgatttctgagggctctgttctgttccattggtctgtatctctgttttggtaccaataccatgctgttttggttactgtagccttgcattatactttaaagtcaggtagtgtgatgcctccagctatgttcttttggcttaggattgacttggcaatgtgggctcttttttggttccatatgaaatttaaagtagttttttccgattctgtgaagaaagtcattggtagcttgatgggaatggcattgattctataaattaccttgggcagtatggccattttcatgatattgattcttcctacccgtgagcatggaatgttcttccatttgtttgtgtcctcttttatttcattaagcagtggtttgtagttctccttgaagaggtccttcacatcccttgtaagttggattcctaggtattttattctctttgaagcaattgtgaatgagagttcactcatgatttggctctctgtctgttattggagtataagaatgcttgtgatttttgcacattgattttgtattctgagactttctgaagttgcttatcagattaaggagatttttgggctgagacgatggggttttctagatatacaatcatgtcatctgcaaacagggacaatttgactccctcttttcctaatcgcatgccctttatttccttctcctgcctgattgccctggccagaatttccaatactatgttgagtaggagtactgaaagagggcatccctgtcttgtgccagttttcatagggaatgcttccagtttttgtccattcagtatgatactgcctgtgggtttgttatagatagctcttattattttgagatacgtcccatcaatacctaatttattgagagtttttagcatgaagcattgttgaattttgtcaaaggccttttctgcatctattgagataatcatctggtttttgtctttggttctgtttatatgctggattacgtttattgatttgtgtatgttgaaccagccttgcatccgagggatgaagcccacttgatcatggtggataagctttttgatgtgctgctggattcggtttgtcagtattttattgaggatttttgcatcaatgttcatcaaggatgttggtctaaaattctcttttttggttgtgtctctgccaggctttggtatcaggatgatgctggcctcataaaatgagttggagaggattccctctttttctattgattggaatagtttcagaaggaatggtaccagctcctccttgtacctctggtagaattcggctgtgaatccatctggtcctggacgttttttggttggtaagctattaattattgcctcaatttcagagcctgttattggtctattcagagattcaacttcttcctggtttagtcttgggagggtgtatgtgtcgaggaatttatcaatttcttctagattttctagtttatttgcgtagaggtgtttatagtattctctgatggtagtttgtatttctgtgggatcagtggtgatatcccctttgtcattttttattgcatctatttgattcttctctcttttcttctttattagtcttgctagcggcctatcaattttgttgatcttttcaaaaaaccagctcctggattcattaattttttgaagggttttttgtgtctctatttccttcagttatgctctgatcttagttatttcttgccttctgctagcttttgaatgtgtttgctcttgcttctctagttcttttaattgtgatgttagggtgtcaattttagatctttcctgctttctcttatgggcatttagtgctataaatttccctctacccactgatttaaatgtgtcccagagattctggtatgttgtgtcttcattctcattggtttcaaagaacatctttatttctgccttcatttcgttacttacccagtcgtcattcaggggcaggttgttcagtttccatgttgttttgcagttttgagtgagtttcctaatcctgagttccagtttgattgcactgtggtctgagggacagtttgttataatttctgttcttttacatttgctgaggagtgctttacttccaacgatgtggtcaattttggaataggtgtggtgtggtgctgaaaagaatgtatattctgttgatttggggtggagagttctgtagatgtccattaggtctgcttggtgcagagctgagttcaattcctggatatccttgttaactttctgtcttgttgatctgtctaatgttgacagtggggtgttaaagtctcccattattatggtgtgggagtctaagtctctttgtaggtctctaaggacttgctttttgaatctgggtgctcctgtattgggtgcatatatatttaggatagttagctcttcttgttgaattgatccctttaccattatataatggccttctttgtctcttttgatctttgttggtttaaagtctgttttatcagagactaggattgcaacccctgcctttttttattttccatttgcttggtagatcttcctccatccctttattttgagcctatgtgtgtctctgcacgtgagatgggtttcctgaatacagcacactgatgggtcttgactctttatcgaatttgccagtctgtgtcttttaattggagcatttagcccatttacatttaaggttaatattgttatgtgtgaatttgatcctgtcattatgatgttagctggttattttgctcgttagttgatgcagtttcttcctagccttgatggtctttacaatttggcatgattttgcagtggctggtaccggtttttcctttccatgtttagtgcttccttcaggagctcttttagggcaggcttggtggtgacaaaatctctcagcattagcttgtctgtaaaggattttatttctccttcacttatgaaacttagtttggctggatatgaaattttgggttgaaaattcttttctttaagaatgttgaatattggcccccactctcctctggcttgtagagtttctgccaagagatcagctgttagtctgatgggcttccctttgtgggtaacccgacctttctctctggctgcccttaacattttttccttcatttcaactttggtgaatctgacaatcatgtgtcttggagttgctcttctcaaggagtatctttgtggcattctctgtatttcctgaatctgaatgttggcctgccttgctagattggggaagttctcctggataatatcctgcagagtgttttccaacttggttccattctccctgtcactttcgggtacaccagtcagacatagatttggtcttttctcatagtcccatatttcttggaggctttcttcgtttctttttattcttttttctctaaacttctcttctctcttcatttcattcatttcatcttccatcactggtacactttcttccagttgatcgcatcggttactgaggcttgtgcatttgtcacttagttctcatgccatggttttcagctccatcaggtcctttaaggacttctctgcattggttattccagttagccattcgtctattttttttttcaaggtttttaacttctttgtcattggtttgaacttcctcttttagctcagagtagttggatcttctgaaggcttcttctctcaactcgtcaaagtctttctctgtccagctttgttccgttgctggtgaggggctgcgttcctttggaggaggagaggtactctgatttttatagtttctggtttttctgctctgttttccccccatctttgtggttttatctacctttggtctttgatgatggtgacgtacagatgggtttttggtgtggatgccctttctctttgttagttttccttctaacagccaggaccctcagctgcaggtctgttggagtttgctgaaggtccactccagaccttgtttgcctgggtatcagcagcagtggctgcagaacagcagatattggtgtaccgcaaatgctgctgcctgataattcctctggaagttttgtctcagaggagtacctggccctgtgaggtgtcattccacccctactggggggtgcctcccagttaggctactcgggggtcagggacccacttgaggaggcagtctgcccattctcagaactcaagctgcgtgctgggagaaccactcctctcttcaaagctgtcagacagggacatctaagtctgcagaggttactgctgccttttgtttgtctgtgccctgcccccagaggtggagcctacagaggcaggcaggcctccttgagctgtggtgggctccacccagttctagcttcccagccactttgtttatctactcaagccttggcaatggcaggcacccctcccccagcctcactgccaccttgcagtttgatctcagactgctgtgccagcagtgagtgaggctccgtaggtgtaggaccctccaagccatgtgctggatataatctcctggcgtgccgtttgttaagcccgttggaaaagtgctgtattagggtgggagtgacccgattttccaggtgctgtctgtcactcctttctttgactaggaaaggaaattccctgaccccttgtgcttcctgggtgaggcaatgccttgccctgcttcggctcatactcggtgctctgcacccactgtcctgcactcactgtccagcactccccagtgagatgaacccagtacctcagttggaaatgcagaaatcacctgtcttctgcatcgctcacgctgggagctgtagactggagctgttcctattgggccatcttggctccaccccctattatgccaattttatagcaaagcaaactaagtcaccaaactgtaatcccattactgggtatatacccaaaggattataaatcattcttctataaagactcatacacacatatatttgttgcagcactgttcacaataacaaagacttggaaacaagccaaatgcccatcaatgatagactggataaagaatatgtggtacatatacaccaaggaatactatgcagccataaaaaaggatgagttcatgtcgtttgcagggacatggatgaagctggaaaccgtcattctcagaaaagtaacacaggaagagaaaaccaaacaccacatgttctcataggtaggagctgaacaatgagcacacatggacacagaggggaacgtcacccactggggcctgtagaggggtggggggctaggggaagaatagcattaggagaaatatgtaatgtaggtgacgggttgatgggtgcaccaaaccaccatggcacgtgcatacctatgcaacaaacctgcaggttctgcacatgtatcccagaacttaaagtatattaataaaaaaattatatatatatatatatatatatatatggagcaggcagttaattttttccttaagcaagtaattctcagaaaggtgctatttggggaaatgctaaaatagaggatgctcagcataaaggctaagtaaaagaaaaacataagaaataaaacacaatgaacagctatatacatgctgaaattttaagatctgagcttcatatttaattcaatttgtcactctgaagttaagtcaaaactgacttttcaagcaagctttttcttctgccaatctgtcaaaccacatgaaaatatagatgatgagtaaaagcaaagaaataaaatctgggctgggtgtggtggctgacacctgtaatcctagcattttgggaggctgaggtgggaggactgcttaagctcaggagttgggagaccagccgacgagatctcgtctctattcaaatttttttaaaaatttggcatggtggcaggcctgtagtcccacctactcatgaggctgaggtgggaggatcacttgagcccaggagattgaggctgcagctagctacagttctgccattgcattccagcttgggtgacagagtgaggccctgtctcaaaaataaatctgtattctgattgtaaaggtaacatatacaaaaaaaaaaaaaaaaaaaaaaccaagggtagaaaatgtggactatcaaaaaacaaatattctattataaactataccagccagagaaccctattgttacaaattttgtttgcaaaactgataccaattctggggagtctaggaagagaaaacagaaattgcaaaggtgcagaggcaggaaatcatatgagactttcaagaatctgaaaatagaaacttggaataaaaacctgaggaggacagggaaatagtagaagatgaggcttcagttgatcataaaccacctcttccagttgcagatccataaaatgtggttaccataggtaggttaattttatccatgctttactatctgcttcctttatcagcaaaccgtcattggttcatgaagactgctcctctgcagatctagccttatgatggctttctatcctcttggcaggaaaggaaaagtgacgtgtgtgtttgtgtgtgtgtatgtgtgtgtatttagtatagtacatttttagaaataacttcctattttctctaaatagaaatgactgaaaataaaatattgtttaataatatttgtaagtggattattagtttttataaatttttgtatgtttttactaattataaaataactttctcatttaaattaaaacattttaggaaaaaccagtcttaaatattattggtaaaatacaaatatcttcaagatgtaaaaatatggtctaaattacacaggtcatgtactacatttactaaatgttttaaggttgtaaactactttttttggccttttaaaaactgtcaacttgcctacttcacaaatgataaggtctaggaacatatggaagtaaccatgcccctaactatactggaaggagtcaaactctacctacacctagcacataatttaaaaaacttactaggttttacattcaggttaaaaattgctaagaattgcctttatgacacacaattgagactactgaaaatatatttatatacaaggtatataaaaacagtaaaacgtgtttagtaaaagataataagaagacatgaaaacatacattttttctaagaataaaaaattgccttacataagagaaaactgaagatttaaacaaattggagaaaaattgtaaaaatattacaaaggaaactgtatgaacatattgactaaattcaaaaagatattatatacaaacagtttttcagaccacagtgcaatcaaaatagaactcaggatgaagaaactcactcaaaactgcaaaacaacatgaaaactgaacaacctgcccctgaatgacgactgggtacataacaaaatgaaggcagaaataaagatgttctttgaaaccaatgagaatgaagacacaatgtacaagaatctctgggacacatttaaatcagtgggtagagggaaatttatagcactaaatgcccacaagagaaagcaggaaagatctaaaattgacaccctaacatcaaaattaaaagaactagagaagcaacagcaaacaaattcaaaagctagtagaagacaagaaataactaagatcagagcagaactgaaggagacagagacacaaaaaacccttcaaaaaatcaacccaggagctggtttttgaaatatcaacaaaatggactgctagcaagactaataaagaagaaaagagagaagaatcaaatagacgcaataaaaaatgatataggggatatcactactgatcccagagaaatacaaactaccaccagagaatgctataaacacctctacacaagtaaactagaaaacctagaagaaatggataagttcctggacacatacacactccaaagtctaaagcaggaagaagttgaatacctgaatagaccaataacaagttctgacattgaggcagtaattaatagcctatcaatcaaaaaaaaagtccagtaccagacagactcacagccaaattctaccagaggtacaaagaggagctggtacttttccttctgaaactattccaaaaatagaaaaagaggaaatcctccctaactcattttatgaggccagcatcatcctgataccaaaacctggcagagacacaccaaaaaaggaaaatttcagccaatatccctgatgataatcgatgcaaaaatcctcaataaaatactggcaaactgaatccagcagcacatcaaaaagcgtatccaccatcatcaagttgacttcatacctgggatgcaaggctggttcaacatatacaaatcaataaacataatccatcacatacacagaacccatgacaaaaactgcatgattatctcaatagatgcagaaaaggccttcgataaaattcaacagaattttcatgctaaatttcatgctaaaaattctcaataacctaggtatcgatgaaacatatctcaaaataataagggctatttatgacaaacccacagccaatatcataccaaatgggcaaaaactgaagctttccctttgaaaaccggcagaagacaaggatgccctttctcaccactcctattcaacatagtattggaagttctggccagggcaatcaggcaagagaaagaaagaaagggtattggaataggaaaagaggaagtcagattgtctctgtttgcagataacatgattgtatatttggaaaactccaccttctcagcccaaaatctgcttaagctgataagcaacttcaacaaagtctcagaatacaaaatcaatgtgcaaaaatcacaagcattcctatacaccaataacacagagaaccaaatcatgagtgaactcccattcacaattgctactaagagaataaaatacctaggaatacaacttacaagggatgtgaaggacctctccaaggagaactacaaaccactgctcaaggaaataagagaggacacaaacaaatggagtaatattctgtgctcatggaaaggaagaatcaatatcatgataatggccatactgcccaaagtaatttatagattcaatgctatccccatcaagctaccactgactttctttacagaattggaaaatactactttaaatttcatatggaaccaaaaaaagagcctgcatagccaagacaatcctaagcaaaaagaacaaagctagaggcatcatgctacctgacttcaaactatactacaaggctacagtaacaaaaacagcagggtactggtaccaaagcagatatgtagaccaaaggaacagaacagagacctcagaaataacaccacacatctacaaccatctgatctttgacaaacctgacacaaacaagcaatggggaaaagatcccctatttaataaatggtattgggaaaactggctagccatatgcagaaaactgaaactggaccccttccttacaccttatataaaaatcaactcaaaatggatcaaaaacttaaacataagacctaggaccgtaaaaatcctaggggaaaatctgggcaataccattcaggacacaggcatgggcaaagacttcataactaaaacaccaaaagcaatggcaacaaaagccaaaattgacaaatgggatctaattaaactaaagagcttctgcacagcaaaagaaactatcatcagagtgaacaggtaacctacagaatgggagaaaaattttgcaatctatccatctaacaaagggctattatccggaatcgacaaagaacttaaacaaatttacaactaaaaaacaacccaaatgaaaagtgggtgaagaatatgaacaaacacttctcaaaacaagacatttatgcagccaacaaacatatgaaaaaatgcttattatcactggtcattagagaaatgcaaatcaaaacctcaatgagatacaatctcatgccagttagaatggcaatcattaaaaagtcaggaaacaacagatgctggtgaggatgtggagaaataggtacacttttacacgttggagggagtgtaaattagttcaaccattgtggaagacagtgtggcaattcctcaaggatctagaactagaaataccatttgacccagcaatcccattactgggtatatacccaaaggattataaatatttgtactataaagacacaggaacatgtatgtttcttgtggcagtattcacaatagcaaagacttggaaccaacccaaatgcccatcaatgatagactggataaagaaaatgtggcacatatagaccatggaatactatgcagccagaaaaaaaggatgagtttgtgtcctttgcagggacatggatgaagctggaaaccatcattctcagcaaactatcacagatcagaaaaccaaacaccgcatgttctctcttgtaagtgggagttgaacaaagagaacacatagatacagggaggggaacatcacacacaggggcctgtctgggggttgggggctaggggagggataacattaggagaaatacctaatgtaggtgacaggttgatgggtgcagcaaaccaccatggcacatgtatacctgtataacaaaactgcacgttctgcacatgtaccccggaacataaagtatgtgtgtgtgtgtgtgtgtgtgtgtgtacaaaaaccagagaaagagcctacactaaagtttaacataggctaggtctcattcattatgatttgagatttaggcttccagctttaaagaatgttgctttaaccttctcttctccctttactttggactgttcattctgtaagtttaagtacactatcattaagaaaaaatgcacaagtcaaatggtttgttatctgcaaagggctcattgtggcatctcacctcacatttccaagccccacacacatggctgttcatgaccacataatgaccaaagtacactcagaaatagaaggcaatgtctgacttctcattggttccagtatgggaatcatccacctgcagctgtgggtccttgctgagctcaaagcacacagcaggttgggcacacactccacacacaccaacccttttccaccttttcccaggccaaacaggagccttcctgatgacactgcaggctttatccctggggggctgcttcagctccttgtacccttcaagagtgagatgctctgcccctcatccctagataaaaactgagacacaatgacagactttgtcctatgagttgtccatttactgaaaacttaatgccacttggtaaagagccacagccccaatcctctgagtatcctcctcccctaggccccatgactggcccacagtgcaactaatgcaggtttcgtgcctggtgcaggagggtctttaggacctgcacttggatgatgcctccatcctccaactagacatttgcgcaccactcacacatgaggtgagcatttagcaaatattctcctttctcttccatcatcctgccatggaccatggggtactcacaagaaagtaaaaacactgtccttctgaatgtcacagaaccaatagtcaaggacacaggtcgtgtgtgtgacacctcctatggagattgagagtgggtgagaagggaaggaccaagtgtggactcccctcctataacagattcccatagtgcaagagtttcgagatcgaagggcaaattctgaggactgctccccctacactaccacagtcaaggtttcatatttttgaagaaattgggggcctataggtaagagcaagggttctggagccaagctgcctggattccagttctgattctgcctcttacttgcagtgcaatctcagatccataacttgaagtctccccacctacgtttctccagaacaaggaggagtataaggagttcctactttgtagggttttcccagtaacagaggagttaatatgtgtgaaacctttgccctaatccccggtatgtacagggccagttaggggttgcaccacagaatggggaccgtccttatgggacactaacctgcattcattttcaactctgaagtgctgaaaacaagacctgaggatgtgaaaacagagaaattcacccagtgagaacggttttataaaaatagggaaataacaaaagaacagagaacccttgtgtgtggaatgaatatgcaaattacaattttttttatgttgttgtctggtttgcttttctttttttctttctttttgtggatacagggccttactctgtcacccaggctggagtgcggtggcatgatcagagctcactgcagcctcaaactcctggactcaagtgatcttcttacctcagtctcccgagtagctacaaataaaaatgcgcacaaacaggcttggctagttttgaatttttttggtacatacaaggtctcactactttacgcaggctggtctggaactcctgtccccatgcgatcctcccaactcggcctcccaaagtgctcggattacagccatgagccacagcctctggcaagttgttgaatagcatccactgtaagctcttcctgaactaaagctaaactggttatttctctgttttggatgattctgtctctaaaaccatgtcccccaatgtcattccctagtaagccagaatctgctcaccctcttctcccagaacgggatagacagcttgggctgggagacagagagagacctgaggctggaggcagaagttggtggtccctctgtgcagatcccacctgaagaaacagccccaatagactgtgttcttcttttccactctgcttggaaagagtcacctgaggatttatgcattcagctctcatgaatgctcagagacgagtccccggtaactcatgatccccaagatctccactagttctgccacccgggatccacattgacatatgtgggaagatgcacagctgcttcatcagaggcgctactgtgtgaggaggaaccttcccatgcacagaaggccacatgcatgttcacagctcaacacccagtcacatcgcagcacacacacccacagtcacacagagccacgccaatcactgagtcacacaggcctgctcactgtgcatataaagatgctcatgcactggtatggctgtgttcacactcacacatcacagtcatgaagacaaagcacaatcacccccttacattcactcacacactcccccatcctggtgggctaatcatgtcccacctaaagtcacatcgtctcagcagagtttcctctcctcagacatcatcacatgcccacagagggttacactgatccagggttcacacaccacaccccacaagcatctcagataccattaccccagtgtctctcttccacacccctaccattctcagtaaatcattcacaatggaaatgttcatattttcatctcataaaatctctctttccttttttagggtgacctgagattattgaaggctgtgccttttcaactcatgggtaacagtgatattgttgtctccctctgggtgactcttctgaattgtgtccagtattctgtgtgaatctcttggagttgaagcatttaaatgatccctgtcagccctgccctttggcttcattcctgattccagccaccttccagcaagattcccctgcagagtgagaagggatggagtgtcagaaacagactcagtcacaaccacacctgtttgcaaccctatgtctgtgatgcagcagaaatgacagtgatgggggtaccaggggaaggaaggggtcaccagggtaatgtgcagatccggatgatggagttagggtgaggggttgtgaagtccagcctccatgcttctcatgaagcctttcctccactgtgcagaattcacctggaatgagtgaatttttctcacttgtgcgatattttaaaaatgggaattcttaaggcaaaacagccagccctggaaaaaaaattctctcattctcttccagaggttctgggagaccatagaccttgatcctcaacaggacctggggagagaggtatagagagtctctgtgtcatcctgactccatccaggccccttgcctttgccaggtgagggccattcatactccatctctcacacacctgggctccatccacactctctcatttttctctgggtgtccatgtgcaataaaatctcagagactcagattctgggagaaaggtgagattcctaagtctagcgcttgatttgtgtgctacttagctcaaaacctgcatgaagacagggacaggggcaggtgatcagacttcagctacaacgcagtcttcacttggggtggaggactcaggacccctcctcaagttctctttttgttataacagaaaacatccttaaaatctgtataggaatttaaagaagaaatgaattcaaatccctctccctccctcctttctttttattttactcttcagttttattgactgtgaatttaaactatttttgaaaacttcatccaagttaacaaaaaatgtatattatgataaattcatgattaaactagcactcatttagccaccacaattgtactcgtggcttgttgctaacacacatggactcctatgtgtcccttccctatcacgtgaccttcttgcccctactggcaaccatgctcctgcctttcttttttgctttgctttcgtcttattactttgtttaattttgcctgtaggtgtttatcttggattttttttattgggtcatgcatcttttctaaaacatttctgtttttaggattcatctatgttgccgtgtggagctatagatccttccttttcacttatctccactctggagttttataaattggccaagacatactcagcagtttactcttgatagatattgaatgacttctagcttgaggctattgaaacattgccttctctgcaaaattatcctgatctcctcgtgccgataatttcttatttcaaggagagtggccaaaaagccaattgaatccctgaaatgtcaagaaagtgtctgcctttctgactggtgaatagaaataaattgtccaaaataaacacagagacctactgggaagacagggatcaagacactctgaggattaaagtctttaaagcatttcagatggagggggctggcccagaattctccccaaatgagacactccagggagaacatttactctcgataaggctggggcatccggaggggttttctgagatcaatggttaggatttactgggtgaggggaggcagtggaaatggaggtgtcctaaccttgtgtctgtgggtggagatgaatgaggcctacaggagagaccatcagtgagagctgtcattgtgtgccctgatcaaagggtttgccttctatccgtctatgaccaagatttacactctgtaaagtagtatctccccttttcactgtttgagcctacagcttcttctctgtgagtgactttttcctttctcggtttgcaaagaggatgggagaagggcatggtcacccatgagcattctttaaatgaacaaatcagatttctgcatttgggctctacctttcgagaaatggtgttgtataccccttgttcctgaactgaggggacgagcatatgagtttctttctctggagattttcttcttggcatttttcctagtaaagtgaagggacatatgagatttggagttcaggtagggtaatgggagcccccaagtgttcttactcctctgttttcagtgtaaagagtgaggttcctactcagttctgctcagctcagacccagccccacccaccctgtcatggatcagttattcaagcccccaatcccattgcttacacctcagtgactcatatgaaattgggtagggttggttcagagtgtctgacatatagtcgatgctatagaaggatgtggttgctaatgccttctcagacatttcagtggccttttcacttactttttgtgtctcaggaagatttatcctccttgacttgttcacaccatctataaaatcccccaagccctcttgatgatgaccactttttctccccatgaaagcaagaaccaaattctgtgaagtttgattaagttttaatgagcaggagtaaggattgaagtgagaaaagatcatgctgttagctggctttggaatcccaagttcacgtagagacagggattccttggcaacatgaagtctggttatctctttaaatagctgacattaaatttggtcagggagatatctctccacacttgcaccatcttcacagcctcaggcttgattctatggtcaaaggtgtaagaggattggccattgaccattacctacagaaggaaaaaaatacatcagaaagacagtatttcaccaaacaagctttcagcctgctctctatggtgtcatagtacctgaaacatccaaccagaaaatgcctcattatatatctgaacccagtagacacacttcttttttacagactacctgttgtaactatctgagacagttgctcactgtattttcaatgtttcctctcatttctccagtgaggctctgtcactctctgtcacatgggccatatttgctcagcctcccctctatcctggaagatctccaaggccagggactgtgtttcataaacttgaatccctgcatcttgcacagggccagccacagggtaagtgctcaacaatgtccactgaatgcacacatttcagttacataaattatgactgctatttgctgctgatgacccagtttctctctggaattgctcatatttgagctagtggcggcaaggaatgtaactcaagtgttcttagagaggtggggctggattaatgttacaaaacataggatattatctttatttatttttttatggttattaaattatttatttattatttattttttttattatactttaagttttagggtacatgtgcacattgtgcaggttagttacatatgtatacatgtgccatgctggtgctctgcacccactaactcgtcatctagcattaggtatatctcccaatgctatccctcccccctccccccaccccacaacagtccccagagtgtgatattccccttcctgtgtccatgtgatctcattgttcaattcccacctatgagtgagaatatgcggtgtttggtttttttgttcttgcgatagtttactgagaatgatgatttccaatttcatccatgtccctacaaaggacgtgaactcatcattttttatggctgcatagtattccatggtgtatatgtgccacattttcttaatccagtctatcattgttggacatttgggttggttccaagtctttgctactgtgaataatgccgcaataaacatacgtgtgcatgtgtctttatagcagcatgatttatagtcgtttgggtatatacccagtaatgggatggctgggtcaaatggtatttctagttctagatccctgaggaatcgccacactgacttccacaatggttgaactagtttacagtcccaccaacagtgtaaaagtgttcctgtttctccacatcctctccagcacctgttgtttcctgactttttaatgattgccattctaactggtgtgagacggtaaacgttagacctaaaaccataaaaaccctagaagaaaacctaggcattaccattcaggacataggcctgggcaaggacttcatgtccaaaacaccaaaagcaatggcaacaaaagacaaaattgacaaatgggatctaattaaactaaagagcttctgcacagcaaaagaaactaccatcagagtgaacaggcaacctacaaaatgggagaaaattttcgcaacctactcatctgacaaagggctaatatccagaatctacaatgaactcaaacaaatgtacaagaaaaaaacaaacaaccccatcaaaaagtgggcgaacgacatgaacagacacttctcaaaagaagacatttatgcagccaaaaaacacatgaaaaaatgctcatcatcactggccatcagagaaatgcaaatcaaaaccactatgaggatattatctttaacagcgtataaacatagaaaaacacctctgactttaatctgaataaaatgtgaatgttttggcctacccatttgaaatgtcagaaactttgatcacattctttattactgaggctacacagggagtcatattttaggtttcattctcaaatttaaaatccatacaactttgaaccagttattccttttctttataatcatgttccaatataaatagggaaaagttggcaatgaaaaaagggttgattagaaagcttaatacagtaacatttgtgagagcaaaacattggaaaccaactcagtgctcttgtaaagggtcaagtacagcaagttgaggaaatccttctaggggaatattatgtaatccttaaaaaaatgaggcagcaccatggatagattatttctccaatatatattctttgagtacaactcaactgtcattcctaaagtgtaatgtgtagggacattgataccagcatttgtttaaaaacaaataaaagtgtatatatgggtgtatgtatatgcttctataaggatagactatggaagaagagtagagaagctagtaatattgttctgaggattgggattgaggagtgagaagtcttcatattggactgactaaaacaattttattcatgtgtatatcttatccatttagctacatgaaaatttaaataacatcataaggggaagatagaggatattctccatttggggaaaatggcaagtgaaccgacattgaccctggtcaggtatgggaaaagagctgaggatggcagtgcaaggagaggtgatggcagagcaagcaacaacacctgttgaatgagagagggaaatgataaaagtaaagggaacccctgtgtgtgtgataaaaagcctgggacagggggagttatgggtgatgaaaagcctgggataaggggagttgtgggtgatgaaaagccggggacagagggagttatctggagttagggcatgaagagctgcctcctgctctgagatcccatggaagccgggtgcggggagctcctggggtgctcacctggtacttatctggcagcactgagatgctcagttcaaattcttggccatcctgaaagggcatattcttggattccacctgctgcttccaggccccatactcacggctgttcatgaccacacgacgaccaaagcacacttggaaatggaagacaatgtctgattcctccttcatctcagtgtggaaatccacctgcagatatggttcattcctgagggcagagcacacagtgttgagcaggtccctttcttgtggggcacacacaagacacacacacaagtctctttgccccttccgtggtcgagcaaagacttgttggtattctaggccttgtcattgtggggctgcttcagctccttgtgttctccatgggtggaaagagatgctccagccctcatccacagatggaaactgagccatagtcactgacttggtcatatgaattgcccattttctgaatattctatgccttttaatagataaagtgtcacagccccaagccttgagtgtcctttactcctagacccatgactagcccccagtgcagctgctgtaggttttgttcctggtgctggagggtctccaggacctgcacattcatggcacttccatcctgccaactagactttccacatgattcacacatgaggtcacccccttagaaaatattcttcctcttctccacctcccatctttgcaccatggagtactcacaagaaacaggcaagtggtcgccctttgattgtcacagtagaaccagtagacaaagaggcagcctctgtgtatggcacctgccaggggattgagagtgggtgagagaggcagggccaggtgtggcctcccctcctgtaacagattcccatggtgcagccagttagagatcaagcagtagactcaggcctccctgctcccaccctacctcagtcaggaccccgtatttttcaaaacaatggggcccatggttaagagcagagcttcagaaactgagctacctcaattagatcctttattgtgctgactactagcagtgagatgttaacatgttttgaaccttttttttagacagggtctaattgaatcacccaggctgtagtgaactggcacaatcacagcccacttcaacctcaacctcccaggctcaagccatcctctcaattcagtttcttgagtagctgagactattggtccacacccagctaattttatacgtatttggagagttggggtttcacgatgttgcccaggctggtctggagcatctaggctcaagggatcctcttgtctcagcctcccaaactcctagattacaggggtgagccactttgcccaaccagcaaggggaccttagatctattgcttaaactctccctgcctcagttttcccaatacaaagatgataatccgaaatacctactttgtatcatgttttcagttatacagtagttaatagatgtaaaccctttagcctaaaccctggcacgtatagggcctgttgggggtcctctatctgaacaaggagggtccttgtggaacactgacctgcgatcatcttcaactctgaaactgtgaaaacaagatgtgaggatgtaacagtagagagattcactccagtaagaaacaacaactttgggttagtttcaatttgagaacagctacaaataatgacactataaacatttctgtataggattttccataaactaaagtgtttacttggctaaaatctggtgagtaaagtgtttctgtttgtttggtgattttatgtttaattttatgggaataccaaacgattttccaatgtagctgtatcattttacatccctccaagcatcgtttgactgtttcaggtactctgcatcttttctaacttgagattgtgagttttattttttattatcattttaaccaccaaaaaaaaaaagaaagaaagaaacaacacttgttgaaagagagagggaaacgaacaggaaagaacaggaaacccctgtgcgtgggaggcacatacatcacaatcatcatgggcaatggacgtccttcccagaaggggcacacattgctgagagcacaaccgcagtacttgcacaaatgaagattgtgggtcagggaagttattggctagaatctataaatggatggtatttttcttttttgaaacagggtcacactgtcacctaggctggaatgcagtggcaccatcaaaactcactgcaggctgggcgtggtggctcacgcctgtaatctcagcactttgggaggccaaggtgggtgcatcacttgaggtcaggagttcgagaccagcctggccaacatggagaaaccccatctctactgaaaatacaaaaattagccaggagtggtggcacaagcctgtaatcccagctactcgggaagctgaggtatgagaatcgcttgaacccgggaggtggaggttgcagtgagccgagattgcaccactgcactccagcctgggaaacagagcgagactctgtctcaaaaaaaaaaaaaaaaaattactgcaggtttgaaggcctgggcttcagtgaacctcttgcatatgccccccagcagctggaactacggtatgcaacaccacattcaataaatttttaaatttttggaaagatgaaatcttgctatgtctcccaggctggtctaccagtcctggcctgacatgggcctttcaattcggccacccaaagtgctgagactacaggcctcagcaaacatcttgatgaatatccactgtaagctctgccttgtaccttcctggttttgggtgattcagtctcttaaatcaagtccctcaatgtccttctctagcatcctggcactcaatgggaaggccaggctagggtaggagacagggagagacctgaggctggaggcaggagccagtggtcactgtgtgcagattccacctaaggaaccatcagccccatcgtctgtttctcacccccattctgcttgggaaaaggcacctgagaattcatgcattctgctctcataaatgctcagagataagtcctcggtaactcaagggccccaagatcccacaagttctgtcaccggggatccacagtgatgcacaagggaagttagacagagtactgctatgtggggaggaaccttcacatgcacagaaggccacatgcatgttcccagttcaacacccagtcacattccagcacacacactcacagtcacacagagccgtgccactcactgagtcacacacacctgctcactgtgcatataaagatgctcatgcactggtccggctgtgctcacacacacactcacatcacagtcatgaagacaaaacacagtcacctgattacaatcacttacacacccacccatatcctggagggccatacacatcccgtctaaagtcacatcatttttagcagagtttactctcatcagataccatcacatgctcacagagggtcacaatgttccagcatccacaccccctacccccctaccccaggagcatctcagataccatagccctagggtctctcttccacacacccacaactctcagtaaagcattcacagtagaaattttcatattttcatcccataaaatctccctcttcccttttctgtgtgacctgagattattgaaggctgtgcctttttaactcacgggtagcagggacattgttgtctccttctgggtggctcttctgaattgtgtccagacttctgtgtgaatctctgagctgcagaatttaaatggcccctatcagccctgcctctggctttattcctgattccaagcccctcccaggaaggtttcctcacacagtgagaaggggtggggtgtcagaaacagactcagtcacaaccacacctgtttggaggcctgtgcctgtgatgcagcagaaacgacagtgagggaggtactggaggaggaaggggtcaccagggaaatgcacagataaagacgatggagtgaggatgagtggtgtgagttccagcctccatgcttctcatgaagccttttctccactgtgcagaatctaccaggaaggtgtgcgttctcctaacctgtgcaatggtaaaaagctggagatcctgggggcaaggcacttggctttgaaagaaaatcctcctcctccttctccagtggttctgggagagcatagatcttgatcattcgcaggacctggggacagaagtagagaaaacacttgtgtcttctttacccaccctcagatcccttggctctgccaggtgagagccactcccactctgtctctcagacacctgggctttaggtacgccctcttatttccctatttcttttcatgtgaatcaaaatctgaggctgtcgttctcctgcagattcttggagaaaggtgagatttctcactcataagtgggagctaagcgatgaggatgcattagcattaatattagttgtgcttgacccgacaataaattccactttccctgatctaaaaccttgacaattcatttccaagcatgcactccaagattctgctcatataaatcagcacaatcacacagttcttttggtatataacgtatttccttaagattaatttgtaatgtcatcccactgcattccttgggttttgactctgggtatggacatggaagcaatgaaaagggtcagaggccacaattaaggagctttggaaaccccgttctaggcaaccaccctcacaccctgcccagaactgtagcttgtaagaaattaccacagaagggaaagaggaactgcttttccttgcaacagatatgcaatagaattttgagtaatatcccagctattcatctgaactggggaagaaatatcagttcagggcgtctggccacctagtaagctgtggataaagatgttgatgttatttacttctcaggcattccagcaatcctttcagtgatgcagagagattgatcttctttaacttccatatcctctgcacaatagcccatacttctgctggttgcaactatttcttcagaaatccattatgccctacgacttgctttcagtctttcttttcaactacatctttccaagcacacactgttcccccgaaaaactttaggttttgtgtatgaaattatataatatctgggatttgctctaaaataatctggggatgacagttctctccttttgcaaacatttgaaattttttacagtacagtttttaattaagtagccagtacatagactatatataaaagaaaaacaaaattatcagtactggcatggctatatcttcaagaaatgctgtagtatgaaaaggcatgaagaaaacatgcataatacgagaccaattattttaacgacaaaaaaataaaattgatctcataagtacacacaaacattcataaatgcactagaaaatgtcaaaagaaggcattccttgtagggggggacactgggtttagaagaaatgaggtcaaggtataaatctgtaatgtttgaattttacccacaagaaggtattatattacttaaatgatttgtataaacattttaaaaataaaggtcataatacagttaaaatttttaaaaaatttaatcacagtttggaacccagcaaccatgcttcttgttacagagcactctttctattttgtgttctgtttttcctgttcctccagcgatgttctaacactctatacagcaaggtgggtttgctcagtcacctctctatcctggaacatccctgcaccacataaattgcctgtcacaaggtaagtgctcaataaatattcattgaatgcataactttcagtgccatggttttatgccatgtagtgataaccggtgttttcttttaagaagatccgcatttattccctttctccttccctccctcccttcctttcttttatacagaaacatcagtgtgattcctggcctttgtctttccatcacactcttcacatgactgacaggacaaccccatgcctctactctcacagaatagccatagcatggccacttctcattgtctgccagttcactgacagcagctttgtgtttactactaagtgtctggctcacagcagatgctcgataactccatttctaagaaataaatatctcttcctgtaacttcttcctgcaattcaaaccagagagtatttctcaggaattatcagttgattgagtggcaaggtatgtctggactatgcatttcatttgaatctattaatagttttatggctagaagagaaaatgaaacaaaaatggattttcagctgggtggaaaagttcagtcagtagaacaagtgagggaacattctggggaacagatgcagagtgtgggcaggctgtcattatgagtgtgacagtgtttaccagctgagctgacctttgttctgatgaaaatcttgtaattcactatccaaatatcaattatatctttgacatacaaaaaaaaccatcgtatcattcttatgcctttgcatcctcatagcttagctcccacttatgaatgataacatacaatgtttggttttccattcctgagttacttcacttagaataatggtctccaattttatccgggttgctgcgaatgccaatagtttgttcctttttatggctgagtagtattccatggtatacatatacaccacaatttctttatccactcgttgattgatgggcatttgagctggttttatatattttccaattgcaaattgtgctgccataaacgttgtgtgcaagtatctttttaaaataatgacttattttcctcggggtagatacccagtagtgggattgctggatcaaatggtagttctacttttagtttcctgaaggactctccacactgttttccatagtgtttgtactagtttacattcccaccagcagtgtaaaagtgttcccttttcaacgcatccccaccaacatctactatttatttatttatttttttattttggccattcttgcgggagtaaggtggtattgcattgtggttttgatttgcatttctctggtcgttagtgatgttgagcattttttcatgtgtttgttggccatttgtttatcttcttttgagaattttctgttcaggtccttggcccactttttgataggactgtttggtttattcatgatcatttgtttgagttccttgtagattctggatattagttctttgttggatgtaaaggttgcaaagattttctgccactctgtgagttgtgtgtttactctcctgattgtttcttctgctgtgcagaagctttttagtttaattaagtcccatctatttatctttttgcttttgttgcatttattttagagttattggtcatgaggcctttgcctaagccaatgtccagaaaggtttttctgatgttatcttctagaatttttatagtttcaggtcttagatttaagtccttcatccaccttgagctgatttttctatgagttgggagatgaggatccagtttcattcttctacatgtggcttgccaattatcccagcaccatttgttgaatagggtgtcctttccccactttatatttttgtttactttgtcaaagatcagctggcagtaactatttgactttatttctggggtttctattctgttctattggtctatgtgcctatctttgtaccagtaccatattgttttggtgactatgaccttatattaacagtatagcttgaagtcaggcaatgcgatgcctccagatttgctctttttgctgagtcttgctttggtatgtatactcttttttggttccatatgaattttaggattgtttttcctagttctgtgaagaatgatggtggtattttgatgggaattgcattgaatttgtagattgcttttggcagtatggtcattttcataatgttgaaattttcacatgggatgctagagcatgggatgtgtttccatttgtttgtgtcatcaacaatctctttcagcagtgttttgtagttttccttgcagaggtctgtcacctccttggtgaggtatattcctaagtattttatttattttatttttgtggctattgtaaaaggggttgagttcttgatttgtttctcagttagttgctgttggtgtatagcagaactactagtttgtgaacattaattttgtctcctgaaattttgctgaatttatttttcagttctaggagctttttggaggagtctttaaagttttctaggtatacaatcttagcatcagcaaacagcgacagtttgacttcgtctttactgatttggatgccctttatttctttctcttgtctgattgttctggctagggcttccagttctatgttgaatagaagtggtgagagtgggcaccattgtcttgttccagttctcagagggaatgctttcaactttttcccgttcagtattatattggctgtgggtttgtcatagatggcttttattactttaaggtatgtctcttctatgactattatgctgagggttgtaatcataaaggggtgccggattttgtcaaatgctttttctgcatctattgagatgataatctgatttttgtttatgtggcatatctgtttatgtggcatctaattctgtttatgtggcatatcacatttattgatttgtgtatgttaaaccatgattgcgttttttggcatgcagggatgcagtgggtttcacctgattgtggtggattacctttctgataagctgttggatttggttagctagtattttgttaagaatttttgcatgtatattcatcagtgatattggtctgtacttttctttttttgttgtgtcctttcttggttttggtattagggtgatactggcttcacagaatgatttagggaggatttcctcctatcttatcaatacaatttgtaccaattcttctttgaatgtctgatagaattcagctgtgaatccgtctggtcctggacttttttgttggcaattttaaaattaggatttcaatcttgctgcttgttattggtcttttcagagtttctaattcttcctggtttaatctaggaaggttgtatatttccaggaatttgtccatctcctctaggttttctagtttacgcacagaaaggtgttcatggcagccttgagtgatctttttgtatttctgtcatactggtcaaaatatctcccatcttatttctaattgagcttatttgggtcttctctcttcttttttggttaatatcactaatggtccattaattttatttatcttttcgaagaatcagcttttggtctcatttaccttttgtatttttttttgtttgtttcaatttcatttagttctgctctgatcttggttatttcttttcttctgctgggtttggctttggtttgttcttgtttctctagttccttgagatgtgaccttagattgtctatttgtgctccttcagactctttgatgcagacatttaaggctatgaactttcctcttagcactgcctttgctgtatcccagaggtttctatatgtttttgatatgttgtgtcactattatcattccattcaaagaattttttaatttccatcttgatttcattcttgtcccaacagtcattcaggagcagggtatttaatttccatgtatttgcatggttttgagggctccttttggagttgattttcaattttattccactgtgttctgaaagagtacttgatagaatttcaattttcttaaatttattgagacttgttttgtggcctatcatatggtctatcttggagaatgtttcatctgctgacaaatagaatgtatattctgcagctgttgggtagaatgttcaaatatctggtaagtccaagctatagttcaaatccattgttctatcggccactgaaaatatacatacacatttattattgcaatagcaaaatgctataagctgggttgaccctataaaatcttccttttctgggaaaaaatccattaataatttcaaataacaaaataaaaatggacggacagttaataaaactataacaagagaatcttggtagtcattttttcttcttctcttccaatcacattaaatcttcaatccaagatatacagtttgctcttcctttaaaacttattaatattctgaccaattctaccagctctacttccacagtgccaaccaaacaggatcaaatgcatctaatggttttttttaaagggagtagtttgactgccaggacctactgaggccaacaatattaagaaagcttctgaaaatactgtaaaagaattttctttaaatagtgaaccaaaaaagcccttccatttgtgtagttgctttgacaaaactgcaaactcaccatcaattaaaactgtaaatatggcaataaaggtaagtccatcttttcgtcttattcttctgttagctgtgactccatttcttcgcttcctcttgccgcaaatctccttgaaagaagtgcctattccttaagcattactactaataaaatatcaaaaaacaacagatgttggcatggatgcaaagaaaagggaatgctaatacactgttggtgggaacgtaactggttctacctctatggaaaacagtatggcaatatctctacgaattaaaaaaagacctaccattccacccagtaatcccaatactgggtatatacatcccaaaaaagaaataattatatgaaaagacaccttaactcttatgtttattgcagcactattcacaataggaaagtcacagaatcaaagtaagtgtccatcaacagttgattgaataaagaaaatgtgctacatatacaccagggaatactaagtagccataaaaagaatgaaattctgtcctttgcagtgacatggttggagctggagactattatcctatgtgaactaactcagaagcagaaaatcaaatactgcatgttctcacttacaagtgggaggtaaacgatgggttcatatggacataaaaatagaaataacagaccctgggggcttgaaaatggggcagagagaggaggaagtgagggttgaaagattacctattgaacacaatgttcagtatttgagtgatgggtacaccagaagcccaagccttaccattatgcaatacactcaggaaaaaaacacgcacatgtgtccccaaatctaaaattaaaaaaaaaaatttaaccctctttatggagggttcaaaggataaaataaagtataactatacaagctttcatataataatagatgaaaacatatatatattgattactcaaaaggaaaaaagaacaacatagtcttactttcttctaatatctttattcatctcccctcaaactcagtctgaatggccttctatccttccacctcatagaaatgattctgttaaaggcattaatggcctgcatattgctaaacacagtggtcagcggtcaggcctcatcttacttaacctgccaggtgattattccttcctccttgataaactttcttcacttagctaccaggacactgaactatcttggtttcttctcatctcactgtttgctccatctcagtgtcccttactgcttcctctttttctcctgacttctttatcttggatcgacccaatgctgtttctcttcctttttttagctgtacttacgcccttggtgatggcaatctctcaaatttgaaatgttatctatttgttacaaccctccaatttgtatccccaatccaaacctctctactaaactctaaacccatatattcaactctctgcacttggacataaaaaagcatctcaagttcaagattcccaaagctgagcttctgatatccttcccccttaaacgtgctccatccacagctttgccaatctcagttgatggcttcttcaacagtgcagtgccttgggccaaatcctggtagttactctcaattcttccccttttatcacatcccacatccaatccaccaggaaatacagtttgcacttttttttaaaacatatcaatattctgaccaattctaccagatccacttctatgatgccaaaaaatcaggattaaatacatctaatggttgttttcagagagagatgtttgtttgtcaggacccattgaaaaagaaatgccactgatgtattttctgggagccagtatttctttcctgatggctgccataaggacccttctattgttctacactccagggaacataatgcaatcaatgtgtgcataagtaaacctaagacacaggtgaagatgtaaagatgattttgttagtttgaaagccaattacgaaggcagaggagcaagatggtggaatagaaggctccactgatcatcccccatgaaaggacaagaggataacaagtacctgcctggaaaaaacaccttcataagaaccaaaaccaggtgagcactcatagtacctggttttaacttcatatcgctgaaagaagcactgaaaatatagcaaaaacagccctgaatcaggggcatcatctccgcccaccaccaccagcccccccaaacacactccctggcagcaacagcgtggtacagagggcatctctgggcggtggcagaggaagaacagcaattgtgaggcaatggactcagtgctgtcctgctagactagaaagaagaactggaccaaactcggctgatgcctgctctgaaaggtaagctccaggccaggcaacatccactacaagctgacttaagggcttttgggtcctaagggaacatcagtggtagactggcagtactcctcatggcctggggaggcaatagctacagaatcaggcttctctgcctttggaaaggggacagaagagtgggaaggactgtgtcatgtagtttgagtgccacctcagccacaatataatagaacactaggtagacttctaaggtttttgagtccagtccctgactcccagatggcacttctggacccacctggggcctgggagatctccctgatcttatgggaaaaacacaggcctggctggctttgccacttgctgatattagagccccagggccttgagcaaacataggcagcagcctggcagttgttacagcagatgtgggtggagactcagtgctgtgctgccatcaggtatgacccagcacacttatagtggtggtggccacaggggtgtctgtgatacgtttccctcagctccaggcagctcagcacggagaggctctgtatgtttgggagaaatttagggaagagaacagagtctctgcctggtaatccagagaactctcctggatcttgtccaagatcatcaaggccatacctccaacagtctgtaaggacacaaatctccttgaaagaagtgcctatcatgtacgtttattgcggcactattcacaatagcaaagacttggaaccaacccaaatgtccatcaataatagactggattaagcaaatgtgggacctatacaccatggaatactatgtggccgtaaaaaaggatgagttcatgtcctttccagggacatggatgaagctggaaaccatcattctcagcaaactgtcacaataacagaaaaccaaacagcacatgttctcactcataagtgggagttgaacaaacaaaacacatggacatagggaggggaacatcacacactgcggcctgtcggggagtgggggactatgggaaggatagcattaggagaaatacctaatgtaggtgatggtttgatgggtgcagcaaaccaccatggcacgagtatacctatgtaataaaactgcacgttctgcaaatgtaccccagaagttaaagtataataataacaaaaaagaaagaagtgcctatttcttgagtattatcatgttattaggcttggggcatccagtgaagtatatacagcttaggtcaccacacccaagtcctttcaaatatctggaaagccttcccaggaaggatggctacaaataagcacagccagtgaaaactacaataaacacctaaccctccaatgcatagacaccaaataacatctgctagcattaacaccaaccaggaaaacatgacctcacaaaatgaactaaataagggagcagggaccagtcttggagaaacacagatatgtgacccttcacacagagaattcaaaatagctgtgttgaggaaactcaaagaaattcaagataacataagaggaattcagaattctatcagatgtatttaacaaagagattgaaataaaaagaaagccaattaaactgctccattgacatgtttccagattcagggtctataaaccacttttttcaatgattgtatgaagcagaaagttgatgtcaaggtgaccagcagcgacacccaggtaccacatcgagggctttgaattaactttcagcagagtcaatcccagtgctgtcaagcaaataaaaatagagtgaggccaacaatctcaagaatacttctgaaaatgttggaaagaattttctttaaatagtgaataacaacaagaaaaaccttccatttgtggagttgcttcaataaaactgcaaccccaccatcaattaaaagtttaaggccacaacaataaagaaatgtccatctcttgatctcattcttctgctagctgtggcctcatttctttgcctcctcttgccacaaatctccctgaaagaagtgcctatcctttgggtaatattcaagagtcaaaaaacaacagatgttggcatggatgcagagaaaagggaatgcttgtacactgttcgtgggaaggtatatttgttctacctcgatggaaaacagtgtggagatatttcaagggatcaaaaataaagctacattttgactcagcaatcccactattgagcacctacctaaaggaaaaaaatgattatataaaaaagacacctggactcttatgtttattacagcactattcacaatagcaaattcatgggaccaacctaagtgtccatcaacagttgactggataaagaaaatgtgctacatatacattgtagaacactatgtagccataaaaagaataaaatcttgtccttggcagcaacatggatgaagctggagtctattatcctaagtgaactaactcggaagcagaaaatcaaatactgtatgttctcacttatacgtgagaggtgaatgatgggtacgcatgaacataaaaatggaaataatagacactggggactccaagaggtgcaaagagatgggggagtgaggatcaaaagactgcttattgaacacaatgttcagtatttgggtgatgggtaccccagaagcccaatccctgccattatgcagtacacccatgtaacaaacatgcacatgtaccccctgaatgtaaaatgtttgaaaaaaaaaaaagaatcttgaccttctttatgcagggtttagaggataaaatcattaaagaatatgcaagctttcttatagtaatagatgataaaatcatatcgattactcgaaaggaaaaaactgcctattcttactttgttatattttcttcattcatttcttttttttattatactttaagttttagggtacatatgcacaggcaacctacagaatgggagaaaatttttgcaatctactcatctgacaaagggctaatatccagaatctacaatgaactcaaacaaatttacaagaaaaaacaaacaaccccatcaaaaagtggcgaaggatatgaacagacacttctcaaaagaagatatttatgcagccattcatttctttttaaactcagtctgaaatggccttctctccttccacctcatagaaatgatttctataaaagtcgttaatggcctgcgcattgctaaacataatggtcggttatcagtcctcatcttacttaacctgccagttgattattctttccccttgataaactttcttcacttagccaccagcacgctggaatctcttggtttcttgctccatctcagtgtcctctactgcttcctccttttctcttgacctctttatcttggattgaccgatgctgttccccttctctttttaagctgcacttactcccttgataatctcaacctctcaagtttgaaatgttatctgttacaggccccaatttacatccccaatttagacctatctactaaactctaaactcatatagtaaactgtctgcacgtggtcatacaacaggcaagtcaaattcaagattcccgaagctgatctcctaatagtcttctcctttaatgtgttccatccacagctttgccgatctcagtttatgaattctttgctcctccagagtcttgggcaaaaatcttggtagtcattctttattctctttttatcacaacccacaaccaattcaccaagaaatatagtttgctcttcctttaaaatatatcagtattctgatcaattctaccatggtccacttccaggatgccaacaaaacaggattaaatacatctaatggttgttttcagaaagagtcgtttgttttctgggacccactgaagaaatgccactgatgtaccttctgggggccagtatttcttacccgatttctgctgtaaggactctcctattattctccactccagggagcatcacacaattggtgtgtgcataagtaaacctaagatacaggtggaaatgtaaatataattttgctagtttgaaagccaattacgaaggcagaggagcaagatggtggaatagaaggctccactgatcatacccctgcaaagataccaggttaacaagaatctaaccaggaaaaaaaaaaaaaacaccctcagaagaaccaaaaatcaggtgagcactcgtaggccctggttttaactatatattgctgaaagaggcactgaagagagaaaaaacagccctgaatctcaggcaccacctcccccggcactccctggcagcagcagagtggtacagagatcttctctgggagctgggagaggaagaacagagcagtcgtgaagcactgaactcagtgctgtccgttagagcagaaagtaaaactggaccaaattcagctgatgcctgctcatggaggaagcatttacactagcgctagccagaggggaatcacagatcccagtgatcttgaacttgagtgaacttgagtgtctgcgaatctcaccactgagagctacagcattctgtgtctccaagtaacctggaaaagcagtctaggctgtaaggactgcaactcttaggctagccctagtgctgaactagggccagaaatagcggacttgggatgcacatgacatacaaaaacaccagcttgggcagccaagggagtactggcatctcctccccaactccaagctgcacagctcacagctccaaaacagacccctttctttcacttaaagagaggagagggaagagtgggaaaagctttgccttgcatctaggatatcagctcagccacagcaggataggacattggttggagtcatgaggcccccgttccaggccctagctcccagatggcatttctagacacaccctgagccagaaggaaacttgctgtcttcaaggaaaggacccattcctggaagcattcatcacctgctaactgaatagctatttatcaccttggaccccaaataaccagcagtgatacccaggtactacgttgagggccttgggtgagcctctgagacctgtgacttcagaagagactcagcacattcctgtctgtggctgttatgaggcaaggctcctgcttgagtaaagcagagggaaaagcaagggggacttggtcttgcaccttaggtaccagcatgaccacagggagtagagcaccaatcggggtcttagagtcattgactcggacttgactcttgaacagcaattctgaaccagccctgggccagaagagagcccactgccctggagggtgagccccaggccaggcagcattcactacaagctgacctaggagctgttgagccctaagagaatatcagagggagtctggcagtattccttgtggcctagagtggcagtggctatggggtgaccactgcctttggaaagagcaaggaagagtgggaaggactatgccttgtggtctgagtgccagctcagccacaatacaatagaacaccaggtaggcttctaaggtccttgactccagtccctgactcctggatggcacttctggacccacctagggcctgggggatatttgccacctgctgatattgagccccaggttcttgagcaaacataggcagcagccaggcagtggttacagaaagcctttgaggagaccaagtactgtgctggcttcaggtctgacccagaacagtcatagtggtggtgaccacaatggtgtttgtgtcaccttttccacagctccaggcagcccagcacagagagactctgtgtgtttggtagaagttaagggacaagaacaagagtctctgcctcataactcagagaattctcctggatcttgtccaagaccatcaatgcagtacctctaagagtctgcaagaagcatcatgttactggacttggggtatcctctaaagcagatacagcttaggtcaccacacccaagttatttcaaatatccagaaagccttcccaagaagaatggctacaaataagcccagacagtgaagattacaacaaatacctaatcctccaattcctagacactgaagaacatctattagcatcaacaccatccagaaaaacatgacctcaccagatgaactaaataagtcaccagggaccaatcttggagaaacagagggatgtgacctttcaggcagagaaaaatagctgtgttgaggaaactcaaagaaattcaagataacacaaagatggaattcagaatgctttcaagtgtatttaacaaagaaattgaaataattaaaaagaaagacagttaaacttctccactgacatttttccagattcagggtctataagccacttctttcaattcttgtctgaagcagaaagtcgatttaaggatattagcaaataaaaatatagtgaggccaacaatcttaagaatgcttctcaaaaaatggtgaaaaatttttcttcaaatagtgaacaaaaaataaaagcctttctatttgtgcagctgcttcaataaaactgcaacttctccgtcaattaaaacttttaatccagacaatagagagaagtccatcttttgatctcattcttctgctagctgtgattccatttctttgtttcctcttgggtgttattaataaaatgtcaaaaaaacaacagatgttggcatggatgcagagaaaagggaatgcttgtacactgttcatgggaaggtagattggttctacctctacgaaaatcagtatgtagatatctcaagggattaaacatagagctccccttcgacccaacaatcctgctactgggtacctacccaaaggaaaagaaacacctgcactcctatgtttatttttatttactttttttttttgagatggagttttgctcttgtcacccaggctggagtgcaatggcacgatctcggctcattgcaacctctgcctcccaggttcaagcgattctcctgcctcagcctcccgagtagagtagctaggattaccggtgcatgccaccacatccagctaatttttctatttttagtagagacagtatttcaccttgttggcccaactggtctcaaactcttgacctcagatgatccacctgtctcagcctcccaaagtactaggattacaggcatgagccacagcgcccggcctgcactcctatgtttattccagcactatccacaatagaaagttcatggaaccaatctaagtgtacattaacagttgattggataaagaaaatatgctacatatggccaggcacagtggctcacacctataatctcaggactttgggaggatcacgagccgggcagataacttgaggtcaggagttcgagaccagcttggccaacatggtgaaacctcgactctacaaaaaatacaaaaattagccgggtgtggtggcacgcacctgtaatcccagcttctcgggaggctgaggcaggagaaccacttgaacccaaaaggcagaggttgcagtgagccgagatcatgccactgtactccagcctgggcaacagggtgaaaaaaaaagaaaagaaaagaaaagaaaatatgctacatacacactgtggaatactatgtagccataaaaagaataaaatcatatcctttacagcaatgtggatgaagctgaaggctattatcctaagataacaaactcagaagcaaaaaaatcaaattctgcatgttctcacttaaaatgagaggtaaacgatggatacatatggacataaaaaatggaaataataaacactggagactccaaaaaagggcagagagaggagggagtgaggattgaaagattacctattgaacacagtgttcagtttttgagtgacaggtacactagaagcccaatccctaccattgtgcaatacccccatgtaacaaacatgcacaggtacccccaaatctaaagtttttgaaaaaaagaatcttgagcatctttgtaaaggatttaaaggataaaataaagaacagccacgcaagttttcttataatagatgaaaaaattatattgattacttaatatgaaaaataaactgcatagtcttactttcttcaatttcttcactcatttgtccttaaactgagtctgaagtggccttctatccttccacctcatagaaatgattctgttaaagtcattaatggcctgcatattgctaaacataatggtcagttatcaggtctcttcttacttaacctgccagttgattatttcttcctgcttgataaactttcttcacttagccaccaggacactgaactctcttagtttcttctcatctcgctgtttgctccatctcaatgtcctttactgcttcctccttttctcttgacttctttatcttgggttgacccaatgccgtttcccttctctttttcagctgtacttactctttggtgatctcagcctctcacgttttaaatgttatctatctgttacaagctccaaatttatatccccaatccagacttctgtaccaaactctaaactcatgtattcaactccctgcacttggacatacaacaggcatctcaaactcaagatttccaaagctgagctcctgatattcttcccccttaaacatgctccatccacagctttgccaatcttaatttatgacttcctcacccgcccagtgtcttgggccaaaatcccggtagtcattcctgattcttctctttttatcacatctcacatctaattcaccaggaaatacagtttgcttttcctgtaaaacatataaatattctgaccaattctaccagctctacttccacaaatctgatctgagttaccattgtcactggaggattactgtcatagccttacaaatactctttcttctgtccatgcctatccgtagtccattctgtacacagcagcaaggcggatccttttaaaatataagcatgatcatatctgtcctctgtccatgcctcccatctttcacttacagccaaattccttaataatggtccataagtttctctgtgatctatttttccatattctcttcaatttcatctcctacctctttccccctctactccagacacagtggcctccttgttgctccttaaaacttctattgacacttcctcataatggtccttgtcagtagctaatatctctgtctggaacctttttctccaaggttcactgactgtttccctgagtcatttgataaagttcaaggcaaatcctacatctccctctgagtgaggaggtcacccgggcacaaatcattgaacacatgtaacagtgaaacagcaaaggaactaccaaaacaaactccacttttgtttaagaggcatttacccattcctgcatgtaagttaagataattttaaagcactgagataaaacacaaaagcaaccatgtagttttttaagtaaactgtacaattaaaggggagatatggaaacaactaactatgttttcctgaagatttatagaagcattgtgacttgaccaaggacaaagaagttcccaatcttctcagagcctcactggtacccagatgtctgcagacttcagtcacctcttgatcccaacccctgagcatagtttcctcatatcgccctcccataagaaccctccagccagcctaagaaacttgagatggtctttgcaaccctagcctgccacctccttgggttgctgcttcccgataaacctgcttctcctcacaccaactctcgtctcttgactttggcttttgagtggcgagcagctgaacctagatttggttacacacatactggcctatagtgcaaaagagaatatgtatatgtttgtcaatgagaatggctggatttgcctaattctctgtttttttgtatttttatttaagtttggaattagttgtatataaaatgtgtgtctgtgcccctgagtgtgtgtgtctggattcagattaatatctccttgtcaggggcatgcctgcgtctcttagctgcaagaggaaaccatgctctgtgtcctgattctacctgggcatcaatgtaggaaacaaagtcttggctttcacctactgatgcatccatctctcccacatctcaacccctgctgactgtctgtttccctgattgtgggtcatatgatgaagatcatgataaatctcatgtccccctctaatggagtagactgcagtttgtgtgtaatggagggtgatgggaaaaggggaagtattagcatgccttgggacccacaatagagacaactcagacttctccagtcaccaaaatgagcagaggtggctgatgtaagagcctgagatacactccaggcaggatttcctttccacatgtgtgtgcctgtgtgtgttggggtgggggcaaactaataaaggtaagtagatgtttgagacagagagagcaagaaggactgtgtttgctctcaggaggttacatttcctatagtaatggctttatggagaaagtcgttttcctgtctctgcagaaggagtccagaattccaggtggatttctgtgaatatcccaaggaaggcgccaccatgacattccacttcccagtgtactcgagcaatgtggtagtgatgaacagcatccagaaagggttatggaatgagaaaaacatgtttctctggctcctttgtgacagggaagtcttttgagctgtgagttttggtgctggacaatcagtaccaggtatgtgggccctaaggggtgaggggcatggacctcagtggctggggtggggctgctgtggaggaactgagtccaaatctgatctggtctcagtagaaaaattggattccatatcctaccatgccctttgctgcacacaagccccagccacaaaagctgacctctggttctggtgctctccttgtcttctccataaaacatgctcattcttgcagatggagctgaaacatcaaaactctgaaccttattggtcactgtctctttctcattgagaaaacacagatcacagacacattccccactgcagtccttcatccctgagggcggaggacatgtctcctgtgcatggcagcagtcttgaccctgaggaaaatattgaagacaactttttaagcactgcagtgtgtgctgtgcaagtacagattcagaggtgaatccaacacatctcctgccctcaaggacagtcaggaatgttgagggaaaattacaggcttgctgtcatcagggtagaccagggatgagaagctctggaagcaaagaagtgggacaatggaggatgatttactgcagccaaggcttggccatgtttcctggagaaggagatatttgagctgttttgttttgagggagaatagaaatttttacaggcaatgagaggaaaggcatttgaggaaagggaaggtggaggtctgaatgttctgagctcacaaacagtacatctctttccccaggtgtttgtgaatgggaagtccacctatatgtttgcccactccctttcaccacagtctgtgaaaatggtgcaggtgaagggagatactttcctgacttcagtggatatattgtaaggggcagagaatcttgcaataaaaatatccacctcattacactcttttataatgtgcatgatcacagcatctcccagaaggtgccagagtgtctcccaatccccacacttaagctaatgatagtaaaatcttcctagtattagccaggacttggctctcgctaataggaaagatcccaagggaagatttggcacatgtggaaattcatcctgggtagggtgtacagagtgtggcttgggaaaggtgcaggtggttaaaatgtcaatggttgcccctgaaatagagacagagccaaagcatctcatgatattatgcagaagatggaagggtgttgggctatggaaggaagaaatatggctttgggcgtgtgactctcttttgagttgtttgttcattcaacacatagttattgaccccttactgtcatatacctctatgtatgccagacattcccatatcactggtgtaaggagctgagaggaccaggaaatgatcctattggcaaaaggaactcgatactgatgagttagggatgaagttgttcttagaggggctccttaactcaggagttaagtgtcagttggtcaggcagatgtaccttgaaccctgatgcatggctttctggaggtctatctcccctccctccactcaggaccactcagggtgcacccaaaagctttcaggggtcacaaagtgtgatccaggagactgggctcagacctttccagacctctctagcctgaggtcctctggagacatacagaaaagccaaaacctgtagacctaattatcctccaagtttctgtggtccctgagtttccacaaactcccagacacttcatgtaaaaagaatggttgcttttgtcatctttaggccctcagagtgttcttccatgattttcctcggaaagttttgttcatgttttttttgtgtttttggttgttgtttgtttgttttgtgttttagagacaagctctttctctgtcacccaggctggcttgcagcagtgtgatcacagctcactgaagcctcgaaccccagggctaaagtgatcctcctgcctcaaccttcttaatagctggtactacaggcacatgtcaccatgcccagctaattttttttatctttgtagagacagtctttctatgttgcccaggctggaatgcactggcaggatcatacctcactgcagactcaaccttctggactcaagcaatccacctacctcagcccttgaaagtgctggtattacaggagtgagccactacgtctggctccccaagaagttttgatattgcttacgtgtctatctattaccacaataataaccatgaaaagatgctgaatcaaaacaaacaaaaatagttcaggttctggagcaagcctggttcaaacctctgctgtcttaattcttagctctgtgaccttgtgcaagtttcttaaactctctatacctcagtttccttttttgaaaaatgaggatagttgtatctatctcatatagttgttgtgagcatcaggtgaatcgatactttttttaaaagatgctgaatcaccagggaaatgcaaatcaaaaccacagtgggatattacctcacatctgttagcatggctattttcgaaagaacaaaagataacaagtgtgggcaatgatgtgaagaaattggaggccttgtgcactgtgggtaggaatgcaaaatggtgcagccactatagaaaacagtatggaacttctgcaaagaattacaaatataactaccatatgacccaggaatcccactcctgggaatatagcaaagaagttgaaatcgggatttcaaaaagatattagcatcccattgttcattgcagcactattcacaatggccaagatatggaaacaacctaaatgactatagacagatgattcaataaaaaaaatgtggtgtatacacacaatggaaaattattcagcctttagaaagaaggatatcctgcaatatgcaaccacatggatgaaccttaaagacattatgctaagcagataagccagccacagaaggacaaatactgcaggattccatttatatgaggtgattgaaatagtcaaaattagagaagcagagagtaaaatcgtggttactgggggtcgggaggaggggtaaatgggatattgctaaccagcggacataaagtttcacttacacaagatgaataagttctagaaattgtctgtacaacactgtgccaatagttaacaacactgtactgcaaacataaaaaatgtgttaagagggtagatgtcatgtcaagcatttttaccacagtaaagtaaaattttgttaaagaatacatgtaaattagtacaaacactatggagaacagtttggtgattcctcaaaaaactaaaaatggaaatccagcaatctcactgctgggtatatatccaaaagaaaggaaatcagtatgttgaagagatatctgcacccccatgtctactgcagcactgttcacatcagccaagatttggaagcaacctcagtgtccagcaacagatgaatagataaagaaaatgtggtgcttatacacaagggagtattattcagccataaaaaagaatgcgatcctgcaatttgtaacaacataaatggaagtgaagttcattacgctaagtgaaataagccaggcaccgaaagacaaccatcacatgttgtcacttgtttgtggatctaaaaatcaaaaacaattgaactcatgaaaatggtgagtacaaggacggtctccagaggctgggaaggatagtagagggctggggatgagagatgcagatggttaatgggtacaaaaaatagttagcatgaatgaataatgcctagtatttgataacacaaccaggtggctatagtcaataactgtacatttaaaaataactaaaagaggccgggcatggtggctcacatctgtaatcccagcactttggaaggccaaggtgggtggatcacttgaggccaggagttcaagactaacctggccagcatggtgaaaccccgtatctaccaaaaaatacaaaaatttcactgggcgtggtggcgcatgtctgtagtcccagctactcagaaaggttgaggcacaagaatcccttgaacctgggaggcagaggttgcagtgagctgagcttgtgccactgcactccagcctgggcaacagagcaagactctgtcaaaaaaaaaaaaaaaaaaaaaaaccctaaactaaaagagtataattggattgttcataacagaaagcataaatgtttgaggggatgtaaaccccaatttctatgatgtgattattatgcattgcatgcctggatcaaaatatctcatgaaccccataaatatatacacctacaatgttcccatataaataaaattaaaaattaaaaacaatacaaaaaaggcatgtgctattctattggtcctggcatactggctttgatagacacatccatcttttctcactggtagtgtcaatcacctacttttatgaaccattcttaaatcaatttgagacagcatcccacattaaattgtacatccaaggagtcaataccagtttcaaaggagatagaaatagaccagatttttcttttttctttttttattttatttatttatttatttatttatttatttatttatttatttattttgagatggcgtctcattctgttgccaagactggagtatagtggcacaatcttggctcactgcaacctctgcctctcaggttcaagtgattctcctgcctcagcctcctgagtatctgggactacaatcatgtgccaccacacctgactaatttttgtatttttaatagagataagttttcaccgtgttggtcgaactggtcttgaactcctgacctcaagtgatccacctgcctcagcctcccgaaatgctgggaatacaggcttgagccaccacgcccagccaatagaccagatttttgaaacatttacatgttaaaaaaagagagagagaaagggagagagcaggatttatatttattcaatgtgagggagagtatgtcaaagattactcccgttcaggaacagctaagtggagagggtttccatattggtacagggaaaaatggaggagaacctgatttgcattaatagtgacaggtgtccagaagaaatgtgagtagtgatgttaaggcagaaattacatgttaatatgtctggagctccagtagaaaaggttgaggtctatggtagagataaacttggcatattcagcacatatcttaaacacgtgcagacttgatatggcctaaaggaaactaacacagatgtggaaacatggggaacccaagactaagcccttcaaaagtctgatccttaagaattgaatagaagaagcatgagaaggctctaggaatgagaaattccatcccccaccccctcccccaccacaacatcaaataacaaccatacttggaacccgcagaatcagtgttgggactcacagcagacagcagcatgacaaggatgcaatgatatttgcagcagggaacatctgggaatacagaaagggccttgcaaaagcagaacccaaaaaatatatacccttagaaggtaaaaaacccaccctcgaggcaactgttaagattgagacaaagaaatgggatggcacagaattgctgagcaccagcagaaaagaggagaaagagcaatatcttttaaattaaacatcagtgtagcaactgaaaaaagaactcttcctcaagataatttattttcatctgatagaaaattgtcataggctgggcatggtggctcacgcttgtcatcccagcactttgggaggccgaggcactcccaaagtggtgggatgagaggcgtgagccaatgggcccagcctattagcatgttttgaaagtatacaatgttatgttactgatgataagtctgtgtcccttcccaatgaggcagttatataggacacaacctaccactacacatacagcctcaaagcactggcccaggctctgcctcaccttacagctgacccatgagggttcatctgacaacttcaggctccagaggcgttgaagaacaacaaattgttgattgtctacacacagagattgttgacggctgttgtgataactcagttcttgtcttcttagtttaaaagaatttaaacaagatgcagaaaaaaaggaatgcttttatgctgttggtgggaatgtaaattagttcaaccattgtggaagacagtgtggcgattcctcaaagatttagaaccagaaatatcattcgacccagcaataccattgctgggtatatacccaaaagaacataaattattcttattataaagatacatgcacacgaatgttcactgcagcactattcacaatagcaaagacatggaatcaacccaaatgcctatcaatgatagactggataaagaaaatgtggtacatatacaccatagaatactatgccaccgtaaaaaggaacgcgatcatgtcctttgcagggacatgcatggaggtagaagccgttatcctcagcaaactaatgcaggaacagaaaacaccgcatgttctcagttataagtgggaggtaaatgatgagaacacacggacacaggggagggaacagcacacactggaacctgtcaggggggcaggggaagggagagcatcaggaagaatagctaatgaatgctgggcttaatacttaggcaatgggattatccctgcagcaaaccaccacggcacacatttacctatgcaacaaacctgcacttcctgcacatgcaccccggaacttaaaataaaagttgatttaagaaaaaagaatttaaacaagagacacacagcaaaagagatgcagcatagagtaatctattgcaaaagaatactttgaaggttaagtgcagaatagacagtacaccctaagagagagaggtcagagtagtttgctcatgagaatgagacagtgttgcgttttgctggagaaacctcatttctgggaaacttacatgattattcataaggaggtgggaaaaggtgttactaataagcatgttctgggtggtcttctgggtgcacacgcacagtagctgtacatgcctgttcatacatcatgtgtctcattagcatcttaaatctccacccagagatgtgttttttactattataatgagcaacagatctgcttgaggacaggtaaaattaaaatgcacattctttctagaaacgaaatcctctactgaagggagctttgcttgaatgagctctattacaatgtgaatgctgaggcttactgtgttgattgtatggccaccaaggttgctgcatcccaaaaacatggtctcttccttgactacctgtcttgcctcaagattatcacatggatttcctcaagcaaatagcatttatgggactaggatgtggacatcagaagacatccaggaagcacttggaaaaagttttctccttgtttctacagacacgccgattgtgctagatgccttggggtcaataaagacccatgtatctcttggtcatctgagcagagttaaattaggaattcaggactggcttttcaggtaaaagaagtgggcactgacagcttggctggatttcccaggtccccatttaattattgtaataaaagctcaggctcattcactccctcatttaatgtctcagctcataagatgaatatctaaggtatggcaacggtctgcaataaacagaatgcttgtgtcccctcatatttatattgaaatcgtaacccccccggcaatgtcacggcataaagaggtagggtcttagggtggtgattaactcgtgagggtggggcccttatgaatgggattagtgcccttctaaaaagtaccccaaggagctctctcgccctctctctaccatgtgaggatacaacaaggaatcagcagcgtgcaacctggaggaggcctttcagcagaacccagccatgctggcacccagatctcagacctccagcctccagaactgtgagaaataaatttctgttgtttataagacactgagtctgtggtatgatgttgtaacaacctgaattgacaaagacatagtctaagtaagaaataattataagacaactttatgccttggagaggcatcactggacagacagtctgtcttattaagtataggacacagtttcttttccaaggctggaaatggatggagcctgaagatgtctctgatgcatcctctcccaccgctagagggcagcatcctaaggatccgtttccgaagcgctggaattgcgtttttagaggtcacagaccctttggtaaacaaataaatgctatggacgcctaatttttagagtatgttctcatgtttacaggttcttctatattcagaattttaaaatatcattctcaccaagaatcggaacttactgaaaaagaagggagtgaaagaatttctgagttcgtgggaaacctggccatgcactgcagtgtaatgaaaactgggactccagggggcaaatgagggtaaatgctgttcctaaagcggggatcagttaaaaaaggtcaatcactaccttaggtgattggtgaaaggttggtgagtttagcccatgagataatatatgtgcttctcttttggggtcccagcctcccaaagtgctgggattacaggcatgaaccaccgcgcccagtctcttatggattttttttaaatcaagaattctctggaaagaacattttcctttccggaaggggccacgtatacgctatcttgagaagaaggcaggttatatttgagaagaatcaaaatttaatgtcagatgcagcaatgaggtttcatgtttagcaaatctgagtctgattgttgaactattacatggacaacataatgtcacagtgggaatctagtgaaaattggcccaatatgtcttgagaagccactaggggaagccaaacactacgtaaccaaaaaaatcaaattggggttaggaaaacagaattagctaccagggaaaataatgtcccaagtgttctcaccttcttcttcttaaattgaagtttaaagcattttgcggctcaacccctaaccgcaaaagaaaagcacacatattatcccatgggctaaactcaccaaccttccacctaaggtagtgattgtcgtcttttaattactccctgcttcaggagcagcgcttaccctcatttgccccctggagtcctagttttcattccactgcactacatggccagacttcccactggctcagaaattctttcactctcttctttttcagtaagttccaattcctggtgagaatgatattttaaaattctgaatatagaagaacccgtaaacatgagaaaatgccctaaaaattaggagtccagagcatttatttgtttaccaaaagggtctgtgacctttaaaaactcaatttcagccctttggaaacggattcccaggatgctgccctctagcggtgggagaggatgcatcagcgatattttttttttttttttttttttttttttttttgagacggagtctcgctctgtcgcccaggctggagtgcagtggcgggatctcggctcactgcaagctccgcctcccgggttcacgccattctcctgcctcagcctcccaagtagctgggactacaggcgcccgccactacgcccggctaattttttgtatttttagtagagacggggtttcaccgttttagccaggatggtctcgatctcctgacctcgtgatccgcccgcctcggcctcccaaagtgctgggattacaggcggcatcagcgatattttgaccagcctggtcaacagggcgaaaccttttctctaccaaaaatgcaaaaattagctgagtgtgttggtgtgcacctgtaatctcagctattcaggaggctgaggtaggagaatcgcttgaacctagaggcggaaatttgcggtgagcggcgatcacgccactctgcactccagcctgcacgacagagtgagtgagactccccttaaaaaaaaaaagatgtggaatgcatgtttacaacagcacaatttgaaattgcaaagatacggaaccaacctatgcatctattgaccaacgggtgaataaagataatgtggtatatatgcaccatcgaatactacgcagccataaaaagcaatgaaatcatgttttttgcagcaacttggatagagctggaggccattattctaagtgaagtaactcaggaacggaaaaccaaatattgcatgttctcgcttataagtaggagctaagctatgggtacacaaaagcatacatagtgatataatggactttggggtctcgggggtggggaagttgggagaggggtgagggatgaaagaccacgtattgggctgggggtagtggctcatgcctgcaatcccagcactgggaggccgaggcaggcaggtcacctgaggtcagcagttcaaggccagcctggctaacatggtgaaaccccatctctacttaaaaaaaaattacaaaaattagctgggcatggtggtgggtgcctgtagtcccagctactcgggagactgaagtgggagaatcacttgaacccaggaggcagaggttgcagtaaactgagatcacagtaagctgagtgcagtggtgcactccagcctgggcaacagagcgaaactccgtcaaaaaaaaaaaaatgactacaaagactacatactgggtacagtgtacactgcttgggtgatgggagcaccaaaaatctcagaattcaccactaaagaactcatctatgtaaccaaaaaccacgtgtacccccaaaactattgaaatttagaaaacattctaaaaatgaataaaataaaataccagtaagacatgtgatgtatgtactcatatgtagagcaatagcacatgcgcatccaggagaccacccacaacatgcttaaaaacaatacccctttccatgccctcatgaataatcgtggaagacttccataaagggagtttcccagtgccagtctgggctgtctcattctcaagctgccgcctctgacctagctttcagagtgcactttcgctctgcaataaactcctttgccgacttttactctgcacttgactctgaaattcttttgtgcggtgaagtcaagaacctgaactggccagccaacaacaatagcagcgtcaggctccgcaagttaaagggctcagacccacctaattgctgccacttcaggtggcagtcgcaaggtctcaactgccacctgcacttctgaccaactggctataaattggggagttcccatgaccctctccaaaggttgaataatttgctaaaatggttgcagaactcagaaaacactttacttagattgttggtttattataaaggatacgacttaggacagccaaatgaaagagatgtatagagcaagaaatggggggctgggtggatggtgcagaactctcaggccctgagtgtgccatgctcccagtactttaaagtgttagcccacccggaagctcactgacaggttttattccttaggcataattgattaaatcattggtcatgggtgattaactcaatctacagtccctcttgcctccctggaggtcggggtggagctaaaaattccaaccctctaatcacgtcttggtctttccagtgagcagccctcatcctgaagctacctaggggcccccagccaccagtcatctcattcacatgtaaaagacactccttactccagagaatccaaggattttggagctgtgtgccaggaacctggacaaagaccaagtctttattttttgttttgtcacaacaggcaatatagtcttctggttaacagcccaggctctggagacacactgcctgggtacagttccatgtcatcttctaaaatgtgcccttagcaagttatttcttaacatatccatgctaattcctcatctgtaaaatggggataataccaactacctcttagttatgttatgaaattacatacattgattttttattgttcaaaaaagaccatgtacatgtcttttgttaataaaataaattgaatgtcattaattgttttcttgtccagattagaatttcatatctgagctttatccaccctcttctctccgtaatgctgaattttacaacctatacaaccgacataactacagctccaggaaatccagaaaaagggtgggactgctctaacctcagctgctgatggcctctttgtagattgtcttagctgatgcctttactctggaagatggcacagtttctcattcctttcccaggaaaggaagatccaatagaaatttacccatcctctcgcccttgatggctacaacctgaaaatgtcttcaatgcatatgacctcactcctagagggtcgcgttttgagaatgcataaaagctcactttgggacgccaaggcgggcggatcacgaggtcaggagatcgagaccatcctggctaacatggtgaaaccccatctctactaaaaatacaaaaaattagctgggcacctgtagtcccagctactcaggaggccgaggcaggagaacggcgtgaaccctggaggcggagcttacagtgagccgagattgggccatggtactccagcttgggtgacagagcaagactacatctcaaaaaaaaaaaaaaaaaaaaagctcaaagctattctttgtgggccgatgatggatataataaacccctcaaacttattctcagatccacaggaaacttgagcgactccctatgttctgatattttctaaatacaatgtactgcattccttttgacttccccaagcccaaacattccagagaattttacagaaattctatttttgatctgaatttgggggcctgcacatgagactttctctcaaattaccctctattttgtccagaaatcccttatagttcatgtccttgggactctgttgaaggggagaaggaggaaagtcctccctactgtttctcatgccttcttgagctctgtgtcctgcatctgtagtgcatgctattaactttgctcccagatcttcttacccatcagggcactcatccctcagatgctgtcacgagaagctggctccccccgctctggagaattgtccttggtcaaacagaagtcacttcacttcggaggtgaaggtccccctcacttcctccaacttgttgtagaaccccaaaatttaggttcacattcccaacgtgcagtcagccaaacattgacacttcagtgcttaggagtagagaggattatcccatttggccaaagtgagagggtaggagagaaagtctctcagatctaacctgcctgtgaacataatagggcttttatgaggaaggtaggtgtgtgggaggtgagatgccctaataatcaaaactgattgcattcttgggcctgatcaaacttctggatgccgtgaaggaggtctgtgtgacctaagaatcagtttcttttttgtttgttggtttttgagacaggatcttgttctgttgtccaggctggagtgcagtgaggggcatgatcatagctcactgtattctcgaactcttgggttcaagtgatcatctcgcctctgcctcccaaatagctgggactacaggcgtgcaccaccatgcccagcaactttttttttttttttttttttttttgagacagagtcttactctgtagcccaggctggagtgcagtagcataatctcgggtcactgcaaactctgtcttccgtgtcccagttcaagcaattctcctgcctcagtctcccaagtagctgggattacaggcacgtgccaccatgcccagctaattttttgtatttttagtagagacagggtttcaccatgttggccaggctggtctcgagctcctgtccttgtgatctgtccacctcggcatccaaagtgctgggattacagacgtgagccactgcgcccagcacccagctaatttttaaaacattttgtagagacaggatctcaccatgttgcccaggctggtctcaagctcctgggctcaagtgatcctcctgctttggccttccaaaatgctgggattacaggcatgaaccaccatacccagccccatggaccactgttctttagaaaaacaagttcattaaccctgcaagtagccccaggagttaggatatgaagttagccaattactcgtgactccctctaccaaaatggctatgtgaaagccagcatgcatggaggaagacgggaaaataaggaaaacaaatctctcacgattttcataatgcaggctcggttacaaacccagaaggcagaatgcagtcaatgacttggtgatatgggggtacagaagaccactcccatacctcaaagagccactgtgaggtgcagttcaacctccagtgcttctccctggaattagactaagctacatccagctgagaccacattccagctcagctccctttgctgtatttcagttttctcacatctctatttctggaagctctgtttcaataaatcacttgaacaagaatccctgtctgaggctgtgcttcaggaatctaatctgtaacaccatctctccaagggagaacatttaccttgttagtctcagtccagaaggaaaccttgttatttcaggccacctgtgttgcaaatcccttcagtctctcacccagggcattgcatttgaatttcaatgctaaatcagatgtatctttcttcaatattctgtatatgaaggttcacagggaagaaactcatacagatcatttgataatactgtcaagcaaaagttgtagaaggccattgttttggactgagctcctatactaggcccaacggaccagaccaaaccaaaataaagtcactcatgctaaatgccacattatccaactgaaactttaagatggcagaaaaatccccaaacagatcagtttttcctgacaataggagatcccactttacctcagtcagtgtaagaaggaagtcccctctgctttaacccttatttaaaaagtaaccggaagtaatttgacatgaaccaatcagctttttttcctatttttctgtttcctttttcccaccttacaaaattcactgttctgccactggccagtgggagctctcattctatttcatagaatgaaggatgaataaaaggattcatgaattacgaataaaagccaataagatctttatctaaatgtgctgtaattttgtctttcaacatgatttgccttaaactgatattcctcacacttattttcatccacatacaacttcttatcatatcttatcctaaagtatcttatcctaaagtataatgaataccacagactggacaatttttaatgaaaagaaacttactgcttacagttatggaggctgggaagtacaaggtcaaggggctcacatatggggagggtcttcttgtttcatcagcccacggtagaaggcagaagaaagggaaggaaagagagagagaaagagagagagagagagacactcgatgttataacaaactcactcccgagatactgagataatgacattaatccattaatccagtcaggcaagccgagctctcctaacctaatcacctttgattaggccccatctcccaacactgttgcattagggattaacttttcaacccatgaactttggagaacatattcaaagcataacaagaagggaaaactagtttgctttttaaatacatgttgatgcacgtagcacacatctggacaccaggcaacatttttctaaggagcctcctactcatcaattcttctctaccccacccatgacaaacatattgccactttctataagtggcattaataggaatgtgaattatgagtgcagaggtacccagcaattctaaatggaaggaccatgacacacatcaataagaacaagatagaatgacaacctggcttaacaagatgccgtgactttataaacctatagtaatttaaggcatatgagatatacaagtcttaagctcagaggagaggctgatgacaattacaccactacagttaaagactgcaaactttagccgggcgcggtggctcatgcctgtaatcccagcactttgggaggccgaggcgggcagatcatgaggtcaggagttcgagaccatcctggccaatatggtgaaaccctgtctctactgaaaatacagaaattagccgggcgttgtggggggcgcctgtagtcccagctactcgttagattcagacagaagaatcgcttgaacccgggaggcggaggttgcagtgagttgagatcatgccactgcactccggcctgggcaacagacagagactccatctcaaaaaaaaaaaaaaaaaaaagactgcaaactttggcatcaggctggctggattcaaagcctgattttgccacttgttagcccatgaatagtaacaagatgcttaaattctctgtgcttgaaagttttcatctgtaaactagagataatattaggacttgcatcacagggtttctgtgaagatcaaaagaaatatgtgaaaatcaccttagcgttagaactgtgccttgcacaaagtaaacactcagtaaatattaactcttattatagaagagtgtgtgttatctcctcaactagataaaataatcatagaatgatggtttcagagttgtgaggccatttaatgcaattagattttataaatctaatctgtacaagtagacttgtgaaataaatctggaatgcctgctaaattttattgaaagcaatcgcgtgtttaatggtgcataatatatcaaagtacatgcatatttaatgctcaaaagacattatctgcttctagagtggattaacatttcaggcagtgagaatgggggtttattactttaatctaaatagggattaagttgattagattcagagtttggttgatttaagtactgattggtacacctgttcgtgtagggcacagtcctttcatcgctcccactaaaagtttaacacgggaactaagctatgaggatgcaaaaggataaggatgatacaatggactttggggaattgggggaaaaggcaggaggatgagggataaaagaccacacattgggtacagtggacactgctgcagtgatgggtgcaccaaaatctcagaaatcaccaccaaagaatgtattcttgtaacgaaaaaccacctgctccccaaaaacctattgaaacaaatatttaaacataaataaataggccgggcacagtggctcacacctgtaatcacagcactttgggaggctgaggtgggtggatcacctgaggtcaggagtttgctaccagcctggccaacatggcgaaacccagtctctactaaaaacacaaaaaactagctgggcgtcttggcagacacctgtagtcccagctacctggggggctaaggcaggaaaatctcttgaacccaggaggtggaggttgcagtgagccaagatcacgccactgcactccagcctgggtgaaagggtgaaactccacctcaaaaaaacaaatttaattaattgaataaataaatacatagactttgaataatcatcatccaaaaagaaaattaaattaaaaggatttccctttgagggagctatctgtgaaaggaaattgcttaatacaggtgagcacaaaaagagaaagcaccctcttatttcatattttatttttcaacttgttaaagattatattttcgagctactctcctaaactagaaacccaccagctctaacttagtattcttctccaggacaaagggtgtcatttgtaaggaatgacaagatctacagggaatgctaaaatgataaatttaatacatcagtgtgacttagttaaagcaaaatcttccagagtctcaaactttgcgtgttattttctggtagctcctgaaagcagtctgagaagaatacaacagaaaagatgaagaattgttttaaaacaaaaattcaaagtaataataataaataaaagcctaatattccctctcgcacttggcaggcaccaacctaccatttttgtacattcagctccacaagactgttaggttctactctgccatctcttaaaagttagcatctaattcacagtactatttaaatttccccagttgtccaaaagcatgtcctttatagctgttttaaaatccatcatccaatcagatttcatgcctttcattgttatgcttctttagtctcctttgtcaccatgcctatagactcaggggctgaggcgggaggcttgcttgagcccaggaggtcaaagctgcagtgagctgagatggtgccactgcactccagcatgggtgacagagtgagaccctgtctcaaaaaaaaaaaaaaaaacctctgtattctataaatataatatgtacaattattccatgtcaattaaaaataaaagagaaaaaagtctttataatccatgtatatgaagttcaaaagctggcattactgatctgcgatgacatagtcaggcaagttggtaccattgcataggcagagatggaaagaagcttgtgggatgctggaaatattctgtttctggatctgggtgctggctacatgggggcttaaaatcgctggtgttacactaatcactcatgaacttttctgcatgtatgtgcaacttagaataagaaaatggaattacggttcacatgctaggcatgcctggatcaggctagtggacagcatcctgtaccaccgtgtcccatcctaagtgctgtagaaacatgttcctaatacttcagtgcatgccaaaataggcaaatattttatttacatttgaaatctcacagtagcaaggtcaactacagccactttcccccagggagagtccaatattttattcatgtctcctaaactcttataatgagcaactaccatgggccaggtcctgtgcagggctctgaggatcacagggaaagacccacaacctccctcatggagaccaacattcccagaaaacccacgcaaataaacatagcgaggtatggtgaagctccgggagtgctgccgcaccacacagaagttctgacctggcctggggcgtatgagagaagcctttgatgagaaagtagggaatgaggcctctgaaagtaaggggagggtgtgctccaaacaaatgcaacaaaaagagaaactgtaactgcacacggttttcagcctcatgcctccgtggaacctgcctgtcaggcgggcacctggaatctcaagcaactttctcaaggtgaggcgatttttttctttcatttctcaagtagcttgtggtaagaaaagtgagctgagactgggtgcagttgctcattcctgtagtcccagctgcttgggaggctgaggcgggaggatcccttgagcctgggaggcggaggttgcactgagccgagatcacaccactgcctgggtgatagagcgagaccccatctcaaaaaaagaaagaaaaaagggaaagaaagtgaactgagtgttctgtgtctcccaaggccccttgaatggctttgtccttcacttggaataaaattcaaacttcttcaccttgccccgaccttggttggcctttccagtttgagcttttcccgatattcctctcccacaacacacctcaactacagtggcctcttatctgcacctcagacatgaaaaggtttttcatgtctctgggcctttgcacttgatgttccctttgcttagaacactcttccctctccttcagtgaaaatgatacttcctcagagacatcttaccttaccttaaaactactgcacatcctctgaatcagtgctgttggtggcattcataacaccagtagtatcataatcagaactgcgtattgtcttgtttccttttttatttcctgcttccctccctagaatgccagcacttgggaaggcggcagtgagttctatttttgtaaatcccaatttcctagtcactggaacaaatcttagcagagcaggcattcaaataattaagcaaacaaatgaagaagtgtcaggggtgttttaacgttaagttctgcaaaattccctgctattggggaggtcataccctttgaatatatcactctctttccatcctcattagtgtcatagggcaactccagggactgattctaacatttaaacggaaaatttgaggcccactttatcctttccgataggatttgggagtttctacccttgactgtgttagaagtgttcctgaattttattcctgtaaaagacatagatggggccaggtgcaatggctcactagcactttggcaggccaaggctggacgatctcttgagcccaggagttgaaggctgcagtgagctatgatggcaccactgcactctagtctgggcaacagagtgagaccctaaaacaaaacgtaaaaagatacagatgggtccttcaatcatttggccttcaggctacctgcaatgttcccagagacagagttctttcgctagtccaagacttttccaaaccaacctggtgggggtgtggaggttgcgggagaggacagagttgaggggtagtataagatgggccaagaccagagtcccatctctgcttcagaaagcttgggtccacattgagtgtggggaggccatatctcatggatagagactagatctgtctagtgaattacactcaccccacaaataagacccatcatggagaagaacgttagggggaggaataaataaatgagttaataaggtgcctgaaaggtggagtaaatgagtaacagagggacagagagagggatgctcagaggaaagaaagaagcatgattcttttaatgcaatttatattttaagtttccttgctgaaaactcgttatgggctccccagctgcccccaaatccatactcaagagaagatacaagatcccctatggtttaggctctgccaagttcttcactgtcatccattgctgtctcaactggaagaggttgaaccgagatgggcgggtgaagggcttaactcccatcatcccaaactcctagcaggatgcctcctgctgcactccgggtctcactggaagccgtccacgcacagggcacctccttcaccttccagtttgaatcatcttaccaacttatttttctctcagcgccttgtttatttactcattgatcccaagtgacatttttgaacattttatccattttcagttcgctccactttcttttgttttcttccactctctggagtcaaggatcagtctttttttttttttttttttttaaacatagttttattcccagtgccctacacagcatcaggcatataataggttctaaataaacagatattgaatggattattggagggcgtggtattagggtaggacagggtggggacatgattacattaaaattctgcttaaataagcgggtcttttagcccagcagtcacatagactcagctcaggagctctgcagcacacagctgatcgaacccactcatttctagaggacaccatgtttggtaagttgggcgaaggcaagaggctggggtttcagtgattgggttgcagacaaatcaagtgagaggtgtgggaccttgtggtggcttcttagaaaccactgggtaaatttagaaaccactgggttataccaacaaggattgtttgaaaaacactttgcaagggattctagtaacttaggaatttgtttctccacatctcttttttaaagagatggggtcttggtatgttgcccaggctggcctcgagctcctaggccctagtgatcctcccacctcaccctcaggagtagctgggacttataagtgtgtgccaccatgtcccgctaatttttaaattttttgtagagacaggatctcactctgttgcctaaggtcgtcttgaactcacatcctttttaatgcctggtaactttcatactttttaaatgtcagtccattgatgggtataaaatagtatgtgatctttaattcccatttctttactaacccgtgtgattgaatctgttcactctattttaaaggccattctgtttttcccctatgctaatttttatatttatatcatttcccagtttttagtatgttttttttcttgaggcttagtagaatatttttgttgtcttctagacactaataatttatctcttatatgtgttgcaaatatattctcccagcctggcttgtgtttttcaatttacttatgagtaccgttgtacaaatattctaaaagttgtcattgtgatatttatcaacattttccttttataattgtacttgtaaaacgtagtttagaagtatattactggctgggcatggtggctcacacctgtaattccaacactttcagatgccaaggcaggcggatctcttgaggccaggagttcaagaccagcctggacaacatggcaaaaccctgtcactactaaaaatacaaaaattagccaggcatggtggcatgtgcctgtggttccagctacttgggaggctgagacacaagaattgcttgaacctgggaggcagaggttgcagcaatctgagattgcaccgctgtactccagcttgggcaacagagcaagactctgtctcaaaaacaaaaaaagtgtatttcttggctggggacataaatgtaattttagttacattttattttaacttcttaaaatgatttgattctaatagaaaaattatgcatcaacaagctcacttatcaaaacttgtacctggctcttctaatacattttcctattgtttaatactaaacttacaaaaatactaattagtcgattttacatattgacctctcagcttggtagatgattttaaactcaaagccacatccttcctcgattttacctcctataacttatcaatgtgcagtgttgcttttctaaagaccagtagaattctaattaccattcctttgatggaaattctacttccctttagaagcttctggaaatttctatatattcctggtattctgatatttttgcaacaacgatccttttgttcatttattgtgctcatcgtggaatgtcttcattctggaaacccctgtgcctcatctctcaaatcttgaattttttttaataaatactttcatgatactctctgaaacattttttagtcagagatatttttagtcacataaatattgctagtgctggacatccctgagcagagatcttatttttttccgaccttttcactctttttgtccacttttgtatactttttctacttcctggaatagctttgtcttccaactcttctattattgcctaagggtttctttttagctactgatttcaaagaacatttgtcttatcagattttcctttcttttcaagactttcttgatgtatgagtgcaatatcttttatccgagcatattaattttaacatttatagattttctttttttttgtaatttttttctaattgttttatatttttagtagagatggggtttcaccatgttggccaggctggttttgaactcctgatctcaagtgattcaccctccctggcctcccaaagtgctagtattacaggcatgagccaccgtgcccagccttatttcttttcttaagaaaaaatgtggttatttgctgctttcctcctcttctttctttttctcttccactttccctttcttttttctctctttctctctgtctctccctctctccctttcttgctgtccccttcctgtttgagaatttttcttcaatgtcctgtaaatttttgttctccctttgtgtctaaacaaatgctgagacactaagagaaacccatgtgcccgatcacttgtcttcactgtgcgataattgggcagcatgttggcttctgtttttccatgtatttgcatgaggaataagagcatcctgaaaatagaaactttcctataaaatagatgaccatgagaatcaggttttactagatgatgaggtcttatttatattctaaaccatagtaaaaactcccattatgcactaatacagtttgcatatttgtcccctccaaatctcatgttgaaatgtgatccccagtgttggaggtgggcctggtggaaggggtttggatcatgagagcagatccctctgaatggcttagtgccatcctcatggtaatgagtgggttctctatctctaagttcacctgagatctggttgtttaaaagagtctgggaccttcccctgctgtctcttgctcccactctcaccatgtaacaccttggctccccttcgccttctgtcatgagtggaagcttcctaaggccctcaccagaagcagatgccagcactatgctttgtgtatagcctgcagagctgtgaaccaattaattcctcttttctaatttacccagttttaggtaattctttataaatgcaaaatggactaacacatgcaccaagcctgtaattaacagacttgcttctttggttactcacatcttccctaaaggagtgagctttctgggaccatgttattgttaaagatacggaggcaaacagtataagtgtactgatgctgccaaagtcacagagctagtaaatgagagaatcgacattcattcttaggtcactaagcttcatatctccttccctacagaccccattaataaatggccaaaccaatagcttcagggtctcacaagccaatcaacatagacagcagtgccactgagtctatgaccggttaggataatagggcctcaaatactcttatgaatcttatagactcatataaacctggtgtcaacatcatgccactattctattctatctcaataaggactcacccaaatctcatcttgaattgtagctcccataattcccatgcgttgtgggaaggatccggtgggagataactgaatcatggggcggtttcccccatacggtgctcatggtaatgaataagtctcataagatctgatggttttataagaggtttccccttttgcttaggtctcattccctctcttgcttgccaccacgtaagatgtggctttgctcctccttgctttccaccatgattgtgaggcctccccagccatgtggaactgtgagtccattaaacttctttcctttataaattacccagtttcaggtatgtctttattagcagcatgagaaacagaaagatgtccccaagttgctaggaaaacatattggtgcccaatgtcatggagaggttgatgttcctcctccaggggctgtaggatgaggccaccaaaataagcttatcccatctgtggcttaaaaacatgtcctgctcagtggaagttggcactgattttctaggaatgcagaacactcccagcaagagagtgaggagtgggtctcgtgagtcaaatgtttagcctaagctcttgattcacaggtcaagcttaggaaagaagcttacctttggaatatacatatttgcattctaataaaacatttttaaatttttttttgtattttcgtaggctattggggaacaagtggtgtttggttacatgagtaagttctttagtggtgatttgtgagattttggtgcacccaccaaccgagcagcatacactgcaccatatttgtagtcttttatccctcacccccttcccaccctttcccccgaatccccaaagtccattgtgtcattcttatgcccttacatcctcatagcttagctcccacttatgagtgtgaacatatgatgtttggttttccattcctgagttacttcacttagaataatggtctccaatctaatccaggttgttacaaatatcattaattcatttttatggctgagtggcattccatcatataatttatatatatataaattatatatatataaattataatatttgtattatatataattatatacaatataatttatatacattatacataaattattatatatatatacatatatatatatacacacacacacacacacaccacagcttatccactcaattgatggacatttgggttggttccacatttttacaattgcgaattgtactgctataaacatacatgtgcaagtatcttttttgtataatgacttattttcctctgggtagatagccagtagttggattgctggatcgaatggtagttctacttatagttcttgaaggaatctttacactgttttccatagtggctgtactagtttacactgccaccagcagtgtagaagtgttgcctgttcactgcatccacgccaacatctatttttttttattttttttattatggccattcttgtggtttcgatttgcatttccctaatcatttgtgatgttgagcattttttcatgtttgttggccatttgtatatcttttgagaattatctattcatgtcattcatgtccttagcccactttttgatggaattgtttggtttttttcttgctaatttgtttgagttcgttgcagattctggatattagtcatttgtcaaatgtatagattgtgaagattttcttctagactgtgggttgtctagaactctgctgttccttttgccatgcaaaatctctttagtttaataaagtcctagctatttatctttgtttttattgcatttgcttttgggttcttggtcattgtgttgctgtctatctcatttcttaggtctagtggataaaagggcgtccattgtctcctaaagtttttattattttttatttatgctctctatttcactgaagatttctcccctcatttcttgtatctttttttttaatttccttaaattgggcttcacttttctctggtgcctccttgattagcttaataactgaccttcagaattctttttcaggtatatcacggatttcttcttggtttggatccattgctgatgaactaatgtgattttttggggatgttaaagaaccttgtgttgtcatattaccagatttggttttctggttccttctcatttgtgtaggctctgtcagagggacggtctagggctcaaggctgttgttcagattcttttgtcccacaggtgttcccttgatgtagtactctcctcatttccttccgaatttttttaatgaaagccttttatctgttccctctgcagaagggccaaggcgttatcgtcggccacgcacaagatttctctccaaacaactcacagcattgagagaattgcttgaaaagaccatgcacccaagtttggctacaatggggaaactggcttcaaagctacaacttgatctatccgtagtaaaggtctgttcccaagtgtgtctgtaggtagcacgcctaacccagagcttcacacacacttttgatcattgttataacagttcctatttattggcaattgctatgtgtaaggacagatgttaagcactttatatttttattgtcatgagcacccactttattgaggaacactaaagctcacatagaagagctgtcttccaagcattataaacacaagagttggaatttgaacccagacctttccaactccagacccaccatgctacacaggactctttgaggctggatctcagatactcccatttgggtctgttcttgtgtattcaggatgggttctgcttaatcaggaccatcacagtcatccagatgcctgtcactaagttcccacaaagtattcatgggagaacacctggatgaaccctaaagatgacccaagctaaactctcaccccatactctgactttaaaatactttctctgggcaccaggaatggtggctcacacttgtaatcccagcactttgggaggtggaggcaggaggatcgcttaagcccagtttaagaccagcctgggcaacatagcaagaccatgtctttacaaacaaaaattaaaaattaaccagacatggaggcacatggctgtagtcccagctacttgggagactgagataggaggattgcttaagcccaggagttcaaggctgcagcgagctatgattgcagcactgcactccaggctgggtgacagagtggtagcttgtctcaaaaaaaaaaaatacaccactaataaaaacacccttctatttaatacatcacaatctaggtcatattccacccattgctagtacaatcctacacccacttttcccttgaaacccaggacagcagagagtagaaagggcttcccttgttccaataaatgtgagactctctctcacaccaaaaaaccgaattcctgaggaacatgaggatgcccctttatactcaacatccattattaacctcccccctcctccctccttagatctggttcaagaaccagcgtgccaaatggaagaggcagcagcggcagcaaatgcagacacggccatcactagggccagcaaaccagacaacttcagtgaagaaggaggagactccctcagccataactactgcaaacattcgtccagtaagtcctggaatctctgatgcaaatgaccatgatctacgtgagccttctggtatcaagaatcctggaggagccagcgcctctgcgagggtttcatcctgggattctcagtcatatgacattgaacagatatgtctgggggcttcaaatcctccttgggcctccactctctttgaaatagatgaatttgtaaagatctatgacttgccaggggaagatgacaccagcagcctaaatcaatatctttttccagtatgccttgagtatgaccagctccaatcttcagtgtaacttcttacacatcacttctaggggaggtctggatctgacccactgagacatatttccacacatctttaatggtttgaccccagtctaagtagatcaggggctgggaatttatctttttctgtagaaaaaacaataaaggaactcccctacctttcatcattgcctgcattttctgaactccatttgagtgcctcctcacccaaatttcagcattaaagattgtattcagagaagtgacgccaggaacacagtgacataggaggttcctgattgatggactgaataaacgtctgtgcctacatcagttctctctggaagaaagtcagaagtgagtggagagactcctacacaccaggcaactaagaaaatgtcttagcaggccagtcgcggtggctcacgcctgtaattccagcactttgggaggccaaggtgggtggatcacgaggtcaggagatcaagaccatcccggctaacatggtgaaacgctgtctctactaaaaatacaaaaaattagctgggtgtggtggtgggcacctgtagtcccagctgcttgggaggctgaggcaagagaattgcttgaacccgggaggcggaggttgcgtgagccaagattgcaccactgcactccagcctgggcgacagagtaagactccatctcaaaaaaaaaaaaaaagaaaaggaagaaaagacaagaaaaaaaatgtcttatcaaacaggcagcaaaagctgaagcactcagaaacactaaacccaccctgggcactgagccatacaatcaggaaggaatccccagttcccagcttctcccccaggagagaagcagtgaaccacacatatagcaccctaacagttgatggttaagttcctaacgagcctgcatcagggagttgactaggtaggtaaactacagacttacaagagcctgaacagaagctaggtgccacccaaagcttcaccccagctcagcccagcaataaatccaggtctatcaattcctcctggaagaagtttgtccacacattgagcaccccaacttttatacctgcactcaagggactgcatcctaaatcccctagctctggaaatggaagggattaggcatatgtgagtctccctagctcacagagaaaaaggtggttttaagcaggcacacaagcacttcagggctagccttcctccaccacactcccccaaccagagcagtgcagagaaggggtcaaaatgtacagctcccagttactcctcaaaaaggatttgccagcacactcttccagctgctgcttgatagtcatgcttttaaccagcctgtatctggaagtcaacagggcagacaaatgctggatccttgggagcctgaatgggagttcagacactgtccaagccttttgcccttgcttgctctagtggtaagtctacagactctccctggaaggagtttttccatgcagtgagcacccaaatttttgcagcttccacggcatcctaaatcacctatctctgggaactgaagggatttgacattcactagtctccctagatcacagcaaagaggtgattttaaactgatgcacaagcatttccaggagatgagaatagtcccagggacctgaggctgaacacacctagctggccactaccacctcaggtggcatctacttgcatgtgccacttacaggcctggagactggcctgctcagcccgtcacagccatcaccaacactagcacaagctgattgggagctagattgtcctgccaatattactgccattgcccatgccacccttgctgcccagtggccccaggaactacgcacctacctggcctacggctggcaatgccagcacccaagaaagccacctggaagcctgggaattggcctacctaaacctgctaaacctgtgccagcgtacaccaccctgggactcaaggacaggctcaccactgccaccactgggcccgaaaaccggcccacctgacatcccctatcccagaaaagcttcacagcctccaccaacaactgcaccttaagccacggaggaaataacactactgatgttgcttacagccaaataaatcatacagagactatacctggataaagaattcaaaataatgatattaaagaagctcagtgagatacaaaagaactcagaaaaataatacaaacaaatcagaaaaacaattcaggatatgaatgagaaatttaccaaagagatagatataaaaaagaaccaaacaaattctggaaatgaagacttcattgaatgaaatacaaaatatatttgaaagcttcaacaacagactaaatcaagtagaaaaaagaatttcagaacttgaagccatatcttttgaaataacccaggaagacaaaaataaaaaagaatttaaaaagaatgataaaagccttcatgacatatgataccataaagcaaccaaattttcaaattactggggtcccagaaggcaaagagagagaaaagggtaagaaagtatttaataaaataataggccaggcacagtggctcacgcctgtaatctcagcactttgggaggccgaggagggtggagcacctgaggtcaagagttcaagaccagcctggccaacatggtgaaacctggtctctactaaaaatacaaaaattagctgggtgtggtggtgcacacctgtagtcccaactacttgggaggctgaggcaggataattgcttgaaccaaggaggcggaggttgcagtgagccgagatcacgccactgcactccagcctggcaacagagcgagactccatctaaaaacaacaacaaaaagtgtgatttatacacaatggagtactatttggccattaaaaaataatttaaaaaaatgaaatcctgtcatttgcaacatagatgagcctaaaggacattatgttaaatgaaataaaccaaacacagaaagacaaataccacatgatctcatacacatgtggaatcctaaaaggtggatctgacaccttacttacaccttactcctgcaagaatggccataatcaaaaaataacaaaatcaaagatcaaaaaatcaaaaaataataggtgttgtgcatgtgtgaaaagggaacacgtttacaccgttggtgggaatgtaaactagtacaaccactggagaaaacagtggagattccttaaggagcaaaaagtagatttaccatttgatccagcaatcccactactgggtatctacttagaggaaaataagtcattatacaaaagagatacttgcacacacatgtttatagcaacacaattcacaattacaataatatagaaccagcccaaatgcccatcaatcaacaagtggataaaggaaatgtgagatatatatatatatatatatcgcacataccatggaatactattcagccataaaaagggaatgaaataatggcatttgcagcaacctggatgagattagagaccattattttaagtgaggtaactcaggaatggaaaaccaaacatcatactttctcactcataagtgggagctaagctatgaagatccaaaggcataagaatgacacaatggactttggggattcaggggaaagaatgggatggaggtgagggataaaagactacatattgggtacaatgtacactgcttgggtgatgggtgcaccagaatctcagaaattgccacttaggaaattattcatgtaaccaaacaccacctgttcccccaaaaacctactgaaataaaataataaaaataaataaggctgggcgcagtggctcacgcctgtaatctcagcactttgggaggtcaaggcgggtggatcacctgaggtcaggagttcgagatcagcctggccaacatggtgaaacctcatctctactaaaaatacaaaaaaaaattagctgggcatggtggcgggcgcctgtaatcctagctacccaggaggctaaagcaagagaatcacttgaacccggaaggcagaggttgcagtgagccaagatcgcaccattgcactccagcctgggcgacaagagggaaactccgtctcaataaataaataaataaataaataataaataatttaaaaaaattgaaaaaataaatacattttttaaagtggacctcatagaagtagagagtagaatggcggttaaaggaatctggggtcattgggggtaaaggggagttgggaagacactggtcaaaggatgcataattacatttagatagaaggaataagttcaagagatctattggacagcatgatgactataattaatggtgatatattgcattcttgaaaaatgctaagagagtagatgttaggtgttctcaccacaaaaaaatagatgataactatgtgaggtaacacatttctttaaattagctgatttggccaggtgcagtggctcacaactgtaatcccaccactttgggaggctgaggcaggaggatcacctgaggtggagagttcgaagaccagcctgaccaacatggagaaaccctatctctactaaaaatacaaaattagccaggcatggtgtcacatgcctgtaatcccagctagtcaggaggttgaggcaggagaatcacttgaaccctggaggcggaggttgcagtgagccgagattgcgccattgcactccagctggggcaacaagagtgaaactccatctcaaaaaataaataaataaataaataagctagatttaaccattccacaatgtatacatatttcaaaacattatattgtacaagataaagtcatacaattttaaaaaacaaataaatttagaacaaaatgatagggaaaggtattaggggctgagtggtatatgggaactgcgtactacctgctcaattttctgtaagcctcaaactgcttcaaaaaataatgtctattgccaggcgcagtggcttacgcctgtaatcccagcactttgggaggctgaggtggtttggtcacctgaggtcagaagttcaaaccagcctgaccaacatggtgaaaccccatctctactaaaaatacaaaattagccgggcatggtggtgcatgtctgtaatcccagctacttgggaggctgaggcaggagaatcgcttgatgctaggaggcagaggttgcagtgagccaagatcgcaccattgcactccagcctggacaacaagagtgaaactccatctcaaaaaaaattataataataatgtcttaattttaaaaaaaaaatgtctagctcggccgggcgccgtggctcatgtctgtaatcccagcactttgggaggcagagatgggcagatcatgaggtcaggagttcgagaccagcctgaccaatatgatgaaaccctgtctctacttaaaaaaaaaaaaaattagccaggtgtggtggcatgcgcctgtagtcccagctactcaggaggctgagacagaagaatcgctttaacctgggaggcagaggttgcagtgagccaagatcgtgccaccgcactacagcctgggtggcagagcgagactctgtctcaaaaaaaaaaaaaaaatgtctagcttgatcttaaaggaatgaatgattccctaagagaacttagtgagggctggagcccttgagttccaccagccaatcccaggagttagctgtaaaagtcactactcacctttgcaaaattcaacttgatcaggtacctctcctttagtttcaggaagaagaagcaagaacctttaaataattaataagtaagtgactgatgtgaagaaacgctgaggctctaaagctggatggaacagagactggactattctctgaccatctaagtctatgcagctataaacaagaaggtaaagctgcaggggctgacctggaggcctcaagatgtatcgataaaccaggatggtagcagctgcggaactgtgaggtgcagcggtccccaatgtttttggcaccaggaactggtttcgtggaagaaaatttttccacagacggcagcggtggggtgggtgggttggggtgggggattgtttggggaaaattcaagcataatacatttattgtgcactttatttctattattattacattataatatatcatcaaataagtatacaactcaccataatgtcaaatctaatgggagccctgaacttgttttcctgcaactagatggtcccatctgggggtgatgggagacagtgacagatcatcaggcattcgattctcataaggagcatgcaacctagatccctcgaatgcgcagttcacaatagagtttgcgctcctgtgagaatctagtgcccaagctgacctgacaggaggcggagctcaggctgtaatgccagcgatggggagtggctgcaaatatagatgaagctttgctggctggcccgctgctcacctcctgctgtggcggtctggttcctaacaggccaccatgggtacccgtctgtgggggtggggagcgggggtgttggggacccctggtatagagtgctctcttgtaacccacccatcctctgagtgcagatttgcaaatacaaccacgttctctagaagggaccctatgagctggaggataagaccacagcctggagttttgcttttgactttcgtaatgtttaggcattttttatggtgagcatagcttacttctgaaatttaataaacgactgtattaagcggtgaaatagtgagtacacggttgtttactttgttattctgtttgcatgaacatttaagaaaaataaaacattgagaattgttggtggcaggtgtggtgggagctttttaaaacaacaacaacaacaaaagctgttccctacatgtaacagggatgtctgtcttcggaggaattggtgagctgcatctcaccccccggtgaagcaaggggtcgtggtggtggaacttgactgggaagtgggaactgatcctggggagcaatcccagaagcctggggctaagccatgtcctgagagtttgggaaatgaatgtattaagcagcccagatgcctaactccagggtcaccaccagcctttgagctccagggggcgctccgcgaacatcccatgaaagcgcgcggggcgcttgggatgatgtttgcaggggaactgagccaggctgtggtcctctgtgccatctcctgccggtgggcagcactcctgttgtgcacagggacccctgtttcctaggtccacaaactggtcgggaaacacgagttgacccggccgccccaacctgctttctaacaagaggttctgtccaagttccccgctcgactttcaatatgtcactcagcgcttaagcctcaccccttatccttgatgtccaatcaggagcgagggttggatccccaggggcctggggaggcagagggttctttttttttttttttaaacctaaaaatttaaatgaagatgaaaatggaagattcttcatggaagttttaatggcaacaattagtctacgaaaaaataggaagtctgaatggaccaataaccaaagaacttacaaaggaagtaaaagatctaagaaagtcctagaaggttttatgggcaaattctgctatacattccgacaaatcgtaattgtactgtctccttaatttttctgtaaatctaaaaccattctaaaataaaaaatttattttaaaaatgtatccaatccccctcgtccaaacctttgaaatgctaaagatttcttttaaaaccctcaatatctctgattattttgttaaggtttttgtttaagactatctattgaaggcagggcacggtggctcacacctgtaataccagcactttggaaggccaaggctggaggatcacctgaggtcaggagttcgacaccactctggccaacatggtgaaaccctgtctctactaaaaatacaaaaattagccaggcgtggtggccctcgcctgtaataccagctcagctactcaggaggctgaggtgggagaatcgcttgaacctgggaggcggaggttgcagtaagccgagatcgcaccactgcactccagcttaggcgagagagggagactcctctgtctcaaaaaaaaaaaaaaaaaaaagagagagagagagcatctattgaagagtgagttttcttacaatgcccaaagcaactgtctccttctttccctggccctctccatgtctgtattcacatagagtctacataatgggcaaattgtgattaacaactttgtctcctgcctttaaaaaaaaatcctaaaatcctatcatactccaggccgtctccacgtctgcttaatgaactgtcttaatttttatttatttatttatttatttatttatttatttatttatttattgagacagagtctcgctctgttgccaggctggagtgcagtggcgtgatcttggctcactgcgatctgcgcctcccgggttcaagtgattctcccacttcagcctcccgaatagctgggattacaggcacgcgccgccacacccagctaatttttgtatttttggtagagacggggtttcaccatgttggcaagatggtctcgattacctgacctcgtgatccacccgcctctgcctcccaaagtgctgggattaacaggcatgggtcactgtgcccggccgaactgtcttaatttttgagagtaggtttattacactgctcgatggacaaaaaaattgggcactcttctaaagctcaggggaaagggtgccaagagaggagtcccagggaagagatgttcagagaacatcataccaccccacctgctctcttttttttttttttcttcaggaaatgaggtctcattatgtttctcaggctggcctcgaactcctggctgcaagccatcctccctcctcagcctcctgagtagctgggattccagctgtgagccaccacgcctggcttgacttttataatgccttctcctttgacagtttgaagcctcttggttaaagcaaagggggacctggagggtgacttcagtgggaagcgggaagagtgactggaaactggtcccttctgctgcatgtctcagtgtaagtgtcaagaagtgctggggtaacgttagccacttcctctctgcaaccagcccccaggcgcttcacttctctctttcctccacctgagatgacacagttgtggttaaggccctggaccaagaggttagcctaaatgagagtcccatctctgcaacttctacctggatgaatttgagcaagtgattcacctctctgagcttcggtttcctcatctgggaaattgagataataacagttaatgtctacatcataaagttgttgtgataactaaataaaaacgtcatgataattaaataaattaaaatgtggcccgggcgcggtggctcacgcctgtaatcccagcactttgggaggccaaggcgggcggatcacgaggtcaggagatcgagaccacggtgaaaccccatctctactaaaaatacaaaaaaatagccgggcgtggtagcaggcgcctgcagtcccagctactcgggaggctgaggcaggagaatggcgtgaacccgggaggctgagcttgcagtgagcggagatcgcgccactgcactccagtctctgggcgacagagcgagacttcgtctcaaaaaaaaaaaaaaaaaaaaaaaaaaaaaaaaaccttgtcactttaatgttttactttattggaaagagattgttaaggattccagctagttgtttctggatagcagaaatgactagccttcttggaacagatcttctgtcttctgaaaaagtcactagaataactcttcagtcacacacatgtaaagcaagtgtttaccccaattgctaagaacccaggaagggaaaatcttaagggatgtgggtattctgggagtaaacagattgacagccacactccttcactttgagatacaaaagttctaaaacatttctgttaaaccagagtggtcagctctcatgagaggatcgaggaattgctataggaaaactcaccataatggttaggggtgtgtgtgttagtagctcagacacaggtaccttagagagctggtattagctaggaaggactactgatgggttgaatttgtatcccctgtggtaagaggcataacaagctgatttctaactgagggtagaaagtgactgtgttaacttggggctgctgcaattacaggaccacaagctgggtggtttaaacaacagaaatttattgtcttgcaaatctggaggggagggtagaagtcaggaatcaaggtgttggcagggctgcaccccctctaaaggctctaggagaggatcctttcttgcctcccccagtttctggtggctccacgtgttccttggtttgtgacagcagctctcccatccctatagagagaaagtagatggtggcttagggatggggaggatggagtgacaggggatgatagctgaagacataaggtttcttttggaggggatgaaaatctaaaattgatcatggtgattgttgtccatatctgtgaatatatgaaaaactattgaattgtatactaaatgggtaaatgttatggtttgtgaattgcatctcaatgaagttttttttaaaatgacacaaacttgagataagagcccaactttattcttttgtatgtggccatccagttgtcccagaaccatttgttaacaggactatcacttccccactgagtaatcttggcaacctagtggaaagtcagttggccgtagacacgtggttttatttctagattctacttctatccttttgatctatatgtctgtcttcatgtctgtaccacactgtcttgattacttttgccttaggttggtacaaaagtaatttcagtaaattttgaagttgggaagtgccagtcctactttgcttttctttttcaagattatattggttattctgggtcccttgcgattccatatgaattgtacattcagcttgccaatttctacaaagtcagctgagattctgacagggattccactgaacctgtagatcaatttagggagtattgccattttaacaatacaaggcttctgatccatatacaagagagattttttttccatttatttaaatcctctttcatttctttcaacaaaatctcaccatttttagagtataagttttgcatttcttttgctaaatttattccgaattttttattggttttgatgctattgtaaatggaattgttttcttgatttcgttttcagattattcattgcaagcatatggaaatacaattgatttttatatattgacctggtatcctgcaaccttgctgaacttgttcaatagttctaacagttatttgctggacttcttaggatttttctatatacaagatcatgtcatctgcaaagagtttacttcttcctttcaatctggatggatgctttttttttttttttttcctttcatgcctatcctgactagaacctccagtacaatggtgaagtggtggaagcagacacctttgccttgttcctgatcttcgggggaaagcatccagtctgttttcactaagtatgatgttagatgtgcttcgtagaggccccagtgtcaggttggggaagttctcttctattgttaacttcctgagagtttttaccatgaatgggattttgctaaatgcttgttttgtatctattgagatgatcatgtggtttttgttttgtattcaactgataggatatactatattaattgatttggggatgtaaaaccaatcttgcattcatcctgtgataaagctcatttttcatggtacgtacttctttttatatattactggattccatttgctagtatttatttgaggatttttgcatctgtattggtaaaaagatattgggctgtaggtttcttgtggtgtctttgcttggtcttggtaccagggtaatactggccttaagaatgagttgggcagtgttccctcttctatttattggaaacctttgtgaagaactgatattaattcttcttcaaatgtttggtagggtcagtggtgaagggcctagggttttctttgtgggtagtttttatattattaattcactttctttgcttgctatagatttatgtagatgtcctatttctcttagactcagtttcagtagtttgtgtctttctagaaatttgtttttcatctcaagtatctagtttattagcaaatagttgctcacagcatttatttctataaggttggtagtaatgtctcctctttcatttctttttttaaaaatttaaattttattttaattgaaaaaatagtaattatatatatttatggggtacaatgtgatgttttgctatgtttatattgttaaatggttaaataaaactaattaataaatctgtcacctcacatacttatttttcatgatgacatttatgataagtgaaataagccaggcacagaaagacaaatagactccatatatatgtgagatacatggaatctaaaagagtcaaactcacagaagtggagagtaaaatggtgattaccagaggctggggaggaagatggatggggaaagggaaactgttgatcaaaaggtacagtttcagttagacaggaagaataaactttagtaatctattgcataaaatggtaattataataaataataatttattgtacatttcgaagtccctttttcatttttgattctagtaatccagtctgctattttttcctggtatatctagccaatgttttgccaatattttggtttgtaaaagagtcaactcttggtttggttgattttctctattgtttttctattctctatttcacttatttctgctccaatcttttattattttctttttctacttgctttatgtgtagcttgctcttctttttcagtgtcttaaggtgaaaatttaggttattttcaatcacttccttaatataggcatatacatctatcagatttcttttaagcactgtttttgctgtatcctacaagttataaggtatattatgtcttcattttcatttatatcaaagtattttctaagtcccttttaatttcttctttgacctcttggttatttaaaagtgcattgtttatgagaacatatggacacagggaggggaacaacacacattggggcctgggggtgggtgaagggagagcatcaggttggatagcaaatgtaatgcatgcggggcttaatacctaggtgatgggctaacaggtgcagcaaaccaccttggctcaggtttacctatgtaaaaaacctgcacatcctgcacatgtatcccagaacgtaaaattaaattaaattaaaatttaaaagagagtgcattgtttaatttccacatacttgtgagttccccagatttctgtcttttatttatatataatttcattatgttgttatcagaaagtatgcattgtatttctactcctttaaatttatcaaggtttatggcctagcatgtggtttatcctggagagtgttccatgtgcacttgagaagaatacaaattctcctgttctacagatatctgctaggtctagttggtttatagtgttgctcaagtgttttatttccttattgattttctgcccaattgttctattcgttatttttttcctgacttgaggtatgactgacaaataaaaattgtatatatttaagatgtacaatgtgatgttttgatatacattgtgaaatgattaccacaactaagctaattaatatattcatcatctcatatagttacaacatttttttaaagttgggtatcaaaatctccaaatattgttgcttattgtgtatttcttcatttctgtcagtatttatttaatgcatgtcggggctctgttgttggatgcctatgtgtttataattgttacatcttcctgatacagtgacctgtagatcataacatatttcttatgtctggtaacgttttttaaagtctattttgcattattagtatcgctgttccagcttccttgtggttgctgtttgcatgatatatcttttttctttctattactttcaatattttgtatctttgaatctaaagtttgtcttctgtacacagaatatcattggatattgttttttaatacagtctgaaagtctctgccttttgatttattcaatccattcacttttaaagttattaatgatatagttagatttacatttgccatttcactttttcttttctatgtcttatgtcttttttgctcttctattcctcctttatgttttcttttatattaagtgaaagttttctaatataggattttaatttctttactgattttttcactaatttctgaattatttcctccgtggttgctctacggcttatcatatacatcttatcaaaatgagcttcagatttatactaacttaatcctagtgagatatagaaacattgttcctatgaagctctattgccttttcccactttttgttagatgttatacatattgcatcaaacattataaacccaggaatgcactgctttaattatttttttatacactttttttttttgagaccgagtttcactcttattgcgcaggctggagcgcaatggcgcgatctcggctcactgcaacctctgcctcccgagttcaagcgattctcctgcctcagcctccctcgtagctgggattacaggcatgcgccaccacgcccagctaattttgtatttttagtagagatggggtttctccatgttggtcaggctggtctcgaactcccaacctcaggtgatccacctgcctcagcctcccaaagtgccagccctattacaagcgtgttaattttatcgtgagaagaagctgttactcttactgggggttcccttgtaagtgacaaggcattttcttttttctgctttcaatttttttccttgtccttggctgtcagtattcttaccaagatgtgtctgtgtgtgtgtgtgtctgtgttcattctacttgaagttcattcagcttcttggataggtattttattgtttttcaataaacttaggaagttttaagccactgtttattagaacaatttttctgtttctttctctttcctctccttctgccattcctattgttttgcttaatggtgttccacatttctctagggctctacttattttttcatctttgttctttccccccattctttggattgcattatttctattttcttttctttttcttttttttttttttttttttttgagatggagtctcgctctgtcacccaggctagagtgcagtggcgcaatctcggctcactgcgttcaagtgattctcctgcctcagccccctgagtagctgggactacacgtgtgccaccatgcctggctaagttttgtatttttagtagaggtggggtttcaccatgttagccaggatggcctcgatctccagacctcatgatccgcctgctttggcctcccaaagtgctgggattacaggcgtgagccaccacacccagccttatttctactttcaagtttgctaattcttctgtcaattcaaatctactattgagcttctctagtatatttttttcatttcggttattatacttttagctctcgatttccatttggttttattttataatgtctaactttttagcgatattttttatttgaccatacctttcctttccttttttaaaaaaatgggtttcctttagttatttgaacagatttataatggctactttgaaggctttgtgtgctcagtctgacatctggttgctttcactggacgtttctgttgcccgctttttttccagtgtaagggtaacatttcgtttcttccagaacccatagcacttctctttcctaactagcattgtccagtaaaacacctgtagtgatagaaatgtttatatctgccctgtccaatgtaatagccactagccacatgtggctattgagcacttgcaatgtggctagtgtaactaagaaagtgaattttaaattttatttcatttcgattaagcataaatagccatatttaacttcaagaagataagtggctatcttcttgaacaatgcaattgtaggccatgctcagagtaccaattccttagaattccctactcaaatgttcccaaacctgcttccagcaactgtttgggcctcttcctagtccatcttctacctgacacccagaacagatcatgctggtacgcacaccccaaacccaaggggtaggcaagaggtgatgtggggtacatgcaccaagctccaatgtgcaggcttggtatccacatacatgcatgaataactccttaggggtacaggacatcaacaaggaaggcaagagaagggagtaagctatagatagggcgcctccatttgtactctttgtccaggatccacaaatgctagagatgtctttgactggtaatgtcccatttcttagctatgtgatggctacatgtgtgttcactgtataattttttgactctatttatatgtacaaatgtgcacgtgtgtatgtgtataggtatacacatatatgctatatttcacaattctttaaaatgattaaaaaatttttaccactattaggataaagtcctagctcgttccatgatatataaagccttgtacaaaccatcttctgcctatcttggacctgatctcctgccattctccctctctcctgtcacctctagtcacactgacctttttgctccagccaacagtgccaagttacagagctgtttgttggaggaggtttaattggccctgcatttaaaaccatttgtattagtgaggcaaagaaatgcctgcgatgggggttgcatgaggactggaatgagcagccacagtgtcagaagtgatgtggcaactgcagcctcccagagtttaggaggaaagacatctgcttatataagaaagctggagacagttctgaaggctgccaaaaaaggaacacttgcaactgaaggaaccatcaatcaggtgccctgaacaggtggaggctggggctactctcagcggaaagccaggctcagagctccaattaccagccatgaggaatccaactatcaaaactgatgccagaggggagggagaggaggagacagaggcctgactcagcggaaagagcgattccagagcacctgaggtaactgacgaaccaccagagaggagttggagatcaataacagaaatatctaactcagtggttctcaaagccagatccccagaccagcagcatcagcttgaccagggagctggttagaagtgcacattctcaggcccccccttggtaagaatcagaaactctaaggcacagggagggaccagtaatccctgttttaagaagccctccaaggtggcttttccaatgttggataaattctgagagccataaatctaactttaattgagcgtggactatgtaccaggcgctattctgagtgtttgcctctattaactgaatattccacataatggcatcatgaaatagaaggtgaaccattttacagatgggagctgtgagacaggataatttatgtaacttacctaaaatcagagagccagacagagggagagatgcaatctgaacctcaagagcatgtgctcttccttcaccactgggctctactgcagtgttgctcagaccttagcacacaactcctggggggcttctgaaaacactcctgctggaaccccttggtagagtctgtgattcactagaattggggctgagaatttgcatttctcacaaggccagatgattcggaggctcctggtccaatttcactctaggagaaccattgtgccatgttttaccaccttccccacctgaggatttagtccagcaaatggaaatgttgattgaggctttttgagaaaatccatgtgcagagccccttgccgggactcttttggctacaaatgacagaaaaccctgttctaattgtcttaagcaaaaatggtatctataggccacttgaaacagcctaagtctgcctctaggcacagctggacctaaggatccaggaggtattaacagttaggattccctctttttctctccatctctcagctcagctttcctctctgccttcattctgttgtcttcattctcccctcacaatggcccccagcaactctggccttagattccaccaggtagaaacccccaagtaccccttcctattatcccatcagaagtacacgctggctgtcattggccagacatggatcacaggcgcatttctgaacaatcattgtggtcaaggaaatgtaatgttcttattagctaggcctgggttatgggctcacctctaaagagcagaaagtgggctgagctgcactaaaagcacacagatcaagagtagggtagaagaatcgggtgctggggccaaaaaaggaaatgaatgttgagcaggcaaatataaccaatgtccactacaccatcctcaaaggacaaaatgtgttcaacattaaactctcaaaggatgggcccaagcacagagatcatgatcaaagggaaaacccaggccaggtgctgtggctcacacctgtaatcccagcactttgggagcccaaggtgggaggatcacttgaggttcaagaccagcctgggcaacatagtgagaccccgtctctacaaaaaaaaaaaaaaaaaaaaaaaaaaaaggccaggcatggtggctcacacctgtaatcccagcactttgggaggccgaggcaggtggatcatttgaggtcaggagttcgagaccagcctagccaacatggtgaaaccccatctctactaaaaatataaaaaattagctgggcgtggtggcaggtgcctataatcccagctactcaggaggctgaggtgggagaattgcttgaacctgggagacagaggttgtagtgagctgagattgtgccactgcactccaccctgggccacaagaatgaaactctgtctcaaaaaaaaaaaatttttttttttaatttagcgggtgtggtggcacatgcctgtagtcccagctgctagggaggctgaggtgggaggattgcttgagccaaggaatttgaggctgcagtgagctatgatagtgtcactgcacttcaggctttctcttggggtctctcgcgtggctatagtcagatagtgacgggagctggggtcatctcgaaggcttcctcacacacatgtctggcagttgatgctggctgctggccagaatacactcatgtgaaccatccatgcggcctgggcttccttccataccaatttgtttccaagggtgagcatttcaagaaagagaaccaggcagaagctgtgttgcctttttgtgacctggcctcagaagtcacatagtgtcatttctaccatactctcctggttgtcttgatgcctaggatcaagaggagtggttacagactccagctcttggaatgggagtggtacatgatcagaagagcagggggaatgggagacattgattgtcaccgtcctttttgtaaaataatatgccacagggaggcaatgactggaaggaaggcatgcgggggattctggggggctattagtgctgtgttttttaaatctgcatgctgctcacagccagttgcataatttttttctttttgagacagggtcttgctctgttgcccaggctggagtgcagtggtgcaatctcagctcactgcaacatccgcctcgcaggttcaagccattctcgtgcctcagcctcccgagtagctgggactacaggtgtgcaccaccacgtctggcaaacttttgtatttttagtaaagagggggtttcaccatgttggtcaagctggtctcgaattcctggcctcaagtgatctgcccacctcggcctcccaaagtgttgggattacaggtgtgagccactgtgcccaacccagttgcctaatttttaaactacaccacaatgtcatttccagagttccagacttccattaattccttcaaatcttagctttactgtcctctccttcacaaaaccactaatgacatcctacactccctcaataacctctgctctctcagctccatgaggcctagtgatacctctattatagtaaatattaccttaccttaaattgtccaggttatgtgtctaccctccactctaggacagaagtcctcaatttttttttttttttttttttgaggcagagtttcactcttgttgcccaggctgaagtgcaatggcggatctcagctcactgcaacctctgcctcccaggctcaagcaattctcctgcctcagccttcccaagtagctgggattacaggtgcccaccaacacacctggccaattttttgtatttttagtagagacggggtttcaccatgttgaccatggctgttctcgaactcctaacgtcaggtgatctgcccgcctcggcctcccaaaatgctgggattacaggcgtgagtcaccgcgcccggccgtcctcaaagattttttatcacatccatgagctgcatctccgctgtatgtatgtgtgcgtgtacatatatacagatacagtggtaatttacaaactgtacagtattaataggcacaatataaaacatgcgctaagacagaaatgcttaaaggatgagacaaaattggttgtactcacgcctgtaatcccagcactttaggaggccgaggcggacagatcacgaggtcaggagtctgagaccagcctgaccaacatggtgaaaccctgtctctactaaaaatacaaaaaaaattagccgcttgtggtggcacgctgctgtattcccagctactcaggaggctgatgcaggagaatctcttgaacccaggaagcggaggtggcagtgagccgagacggtgccactgcactccagcctgggcaacagagtaagactccatatcaaaaaaaaaaaagtggttgtaaatagactttctaatattttcctgcacctaaaatgtttgtcttgaaaacccccagaaaaccaggaccatcttcagagactattaccatgaccacaaattccacaaggacaggtaacaatctgtcttactcacctcagtatcccagccactgaatgagatgtgaaaatgtattcaattgtacaccaaacatgtattacagaatgggagaaaatatttgcaaactctccatctgacaagggattaataaccagaatataaaaggagctcaaacaactcaataagaaaaaaaaacttataaacttatttaaaaatggccaaaagatctgaatagacatttctcaaaagaagacatacaaatggcaaacaggcacatgaaaaggtgctcaacataactgatcatcagagaaatgcaaatcagaattacaatatcatctcaccccaagtaaaatggctttcatcccaaagacaggcaataacaaatgctagtgaggaggtggagaaaaaggaaccctcgtacacagttggtgagaatgtaaatcagtacagctactacggagaacagtatagacgttcctcagaaaaagtgaaaatagctgggcgcagtggctcatgcctgtaatcccagcactttgggaggctgaggcgagtgggttgcctgaggtcaggagtttaagaccagtctggctaacatggtgaaaccccgtctctactaaaaacacaaaaaaattagctgggcatggtggtgtgtgcctgtaatcccagctactccgggggctgaggcaggggaattgcttgaaccatggagatagaagttgcagtgaacagagatcgcaccacggcactacagccaggcaacagagcgagattccatctcaaaaaaaaaaaaaaaaagaaaaagaaaaagaaaaactgaaaatagaactaccatatgatcctggcagaatcccactgctaggtatatatccacaagaaagaaaatcagtatatggaagagacatctccactcccatgtttgttgcatcattgtttacaagcgcccaaatttggaatcaacctaagtgtccataacagatgaatggataaagaaaacgtggtgcatatacacaatggagtactattcagccataaacaagaatgagatcctgtcatttgcaatgacatggatagaactggaggacattatattaagtgacagaagccaggcacagaaaggcaaacttgacatattttaactcatttgtgggagctaaaatgtaacaactgaactcatggagatagagagtagaaggatagctgccacaggctgggaaaggtagtagaggggagaggaagtggagatagttaatgggtacaaaaatacagttcgacaaaatgagtatctagtatttgataacacaacagggtgactacagtcagaactgatttgttgtacattttagaataactgagggagtacaattggagtgttcataacacaaagaaatgatgaatgcttgaggtgatggatgccccatgtaccctgatgtgattattacacacacacctataccaaaatatctcctggaccccaaaaatatgtacacctactatgtacccacaaaaatggaaaaattaaaaataattttgaaaagcttacttaagaaaaaaacaggtaaaattttcaaagctagaggacatcagagaaaaagtcaggatatagtaaaaaaaaacatgaaacttaagccacttctggccctcccatcagaaagcttgatgccagatgaagattgcagccaagagccctggagagggggtggcaccgtggagagaaagagaagcaagaaaagaaggggtttggtgctaggtagttcttggtgatgagtcataactgactgcaaaaagtcagcgtaaatagacacttggtgaaggccgggcgcggtggcttatgcctctaatcccagcactttgggaggccaaggcaggtggatcacctgaggtcaggagttcgaggccagcctgaccaacatggtaaaaccctatctctactaaaaatacaaaaattagctgggtgtggtggcgggcacctgtaatcccagctacttgggaggctgagacacgagaatcgcttgaacccaggaggtggaggttgcagtgactgttaaaaaaaaaaaatagatccctggcggggcacacatactgctcctcccatcaagggatggttggcataccttggcttgaatccaggttgcccttagtgacttacttgaccaatataattcagaggaagtggcattctgggacttccgaggctagagcataagatgtgtggcttctgattgagctttttggaaagctcagtcttggaatgctccctctcggaacccagtcatcacactgtgagaggcccaagtcacctggagaggttatgtctggcattccaggccacagccagcatcagcttccagccatgtgagtgagccatcttgaccttcagagtggggcctttagataactgtggtcccagctgatatccaactgcaatggcatgagaaccgcccagctgagcctagtcaacctggagaaccatgagtgataataattaagttgttttcaacagcaaaatttggtgtagcagtagataacttaaaccgtgggctgcctccaacagcttctgtaaatatcgacaactttctcctgatcttaaatgtatgactgcaatgttggaaatctcttaaaagtgatgggtggaaacagcagtgtgtctgggcacagaaggcttccaatggatggcaagaccaagcatgataatctgtggtctcttttagagcccactcggtaaaatgggggacctggaaccaacctcgcagggatgttgtaaggattcatgcagttaaagcctgcaacgcaggtcctgatgcatagtaggtgcctcctaaaatgttagttttaacgtgtgtatcatgtggatcactagttaacatgtgtttgactgcagctaaatggccccaaatcagcagtgcagtggctcacacctgtaacccaacactctgggaggccgaggcgggtggatcacctgaggtccggagttcaagaccagcctggccaacgtgaggaaaccccatctctacttaaaaaaaaaatacaaaaagttagccaggcatggtgttgcatgcctataatcccagctgctcgtgaggctgaggtaggagaatcgcttgaacccaggaggcagaggttgcagtgagccaagatcatgccactgcactccagcctgggcaacaagagcaaaactccgtctaaaaaaaaaaaaaaaaaccaaaaggggctgaacaaaaaaggaactgcattgtttcacatagcaagaaaagcagaggtgggttccagggttgttaaattcattaatttatctattcaaacattttagttctacttcagtaaaaattttatttaaaaatacatgagtaccaacccattgtcaggcactgttccaggatctggagatatagcatagaagaaagcaaagtcccttaggtggttcagtgacattatcaagaacttaggtcctttgtcttttctgcactgccatcttcagcatgacacctgcatcaccagatggtggccaccgccccggcatcacccgcttacacggcatttccagggacagaacagggagtctgctctagcctctctctctttttgtgattcaactttattgagatataatttacatgcaataaaatatatccactttaagtataaaatgcaataaatcccaaaagtttccctcatcccttgtgattttaagatacagttttatcacatatttttgtatgcttaaaaatgtttccttttgcttggctttgagctttataaatagtatcatcctatatggagtcttttgttttattcacattatgtttctgtaattcttttttttttttcttttttttttttttttgagacagactctcaccctcttgcccaggctggagtgcagtgtccaggatcatagctcactgcatcctcgacctccaggcctcaagcgaccctcccacttcagcctcccgagtagttggagctacaagcacacgccactgagcccagctaatttttgcattttttgtagaaatagggtttcaccatgttccccaggctggtcttgaacttctggcctcaagcaatcctcccgtctcagcctcccaaagtgctgggattacaagcaggagccaccatgcccagcctaaattcatctttttcttgtacatctgttgttccttcattttcactgctgtgtaattgtccgtcatgtgagatatactaaaatttatcaattctcctttaaatggacatcagatgtgtttctttttgctatcagataaatgctttacaaaagcatacaaaagttgacagatgaactttgtatacttgatcttagccaaaggctgagaagagatactatgaactttaacatctcaatcgatgcatgtggtcaaatatctcttcttgggtaaggacctaggagtgccaagcatatgggattcagattttcaatttggttcagtttttcaaaataacaacaaactacttcccagagggttgtactaatttgaactcccatcagcaacatatgagatgtcctgtgaatccccatcctcacctacagccatcttaacttttgtcaatttgaggctgtgaaacagaattttagtgtggcctttttttctttagatgttccatataattaggggctggcttttagtcagatggctgggaccaaacgattgaggaggaagggaatttagagggtgactgtaatgatgaatctataattggtaggggacagtgggcagggtgggatggaaaaaggagagccatgatggacagggagagtgtgggaacgtggcctggaggttgcgctggaagcagaggtggtacttgaacaagcaagctggaaggagaggaagtggatttcagtttcctgatctttgtcttgctctgattagggatgagttggaacatcttttcatgtcaattacaaaactactgaagcaaccaaagaatctcaaaggaaaagaccgacagactatttttaaaattactttatttaaagcaatgtttctatgcaatttaaataaaagaaatctctggagaaaaaaaaaatctctttatcacaatctatgttgtacccaaaactgatataacttaacaaagaaaagaccaagcccccgttcaggaatgtgccattggtaaagggcaaatcctgagaggagctacagggtagctcagagacaggtgggcagagcaattctacagaaggcagatgtgatccatggcatggctactgcacgcccagcaggagtcgaagcagcaggagatgctgtgctggtggctgggccatcaaaatgaggcctctgaggctggcttcacagtccagttgtgaaatgtgcacgacccacatctcacgtgtcatttattaatgcagtatattcactgactgtgtgccaggctctgcagataatgtggcaaccaagatagactctgcccccatgctcatggatttattgtccaaagatgagacagacgcagagatgctgacatcacagctggtcaaggtgggacaggggagaggcagacagatgggtcaaggctgggatgggagaaaccccaggagctgtggaagctcagaacgggccccccacccaccctgggggaccaagggggcttcctaaaggagacacctttactgagacctgaacagtgtatggaattagttgtggggaggtgggtgaaagaagggtgctccaaaaagagggagaagcacgtacaaatgcccacaggtgacagggagtcgggagtgttctagaccagcatgatccaacagaagagtaacacgagccatacatgtgagctgcaaagctaattaaacattttctaatagcccaattaaaaaaaccataaaattaattgtaattttaataatatattttatttaactcaatatatccaaaatattaccatatcagtatgtgatcaatataaaacattttttttgtaccaagtctttaactctggtgggtatttatgcttaaaatatatctcaagtcacacgagccacatttcaagtgcccaggagccacatgtggccagtggctcctgtactgtactgaagagcagggcaacacctttgctactcaaagccttggcatcatttgggagcttgaaatgcagaatctcaggccccttcctcaacccaccgaagcggaatctacattcaaaatcccagatgcacatcagagtttgagagaaatgggtccagttctgcctaaaatacttctgtggcttcctactgccctcatgataaatgtccagctattgaggttggcaatcattcattcactccttcatttactcattcattcagcgcatggttactgagcacctactgagtgccaggccctgtgctgggtgatgttgaggactcaccgacggtacagacagacctgattctgaccctgctggaactcccagacagttaataaatgagtagccaaatcactgtttcatttggactatgtgaaacataatatgcttaatgtgaatttgcagtgtacaaggagtgtcagggaaggtctgacccgatttgagtggaaagggatccagaaaaataacccaaataagggaagaggccaccaccatggcgaaaggccacaagcagattaaatgtcctattgcagaggacaggattgccaagcaactccagcccattcatggtcattaagaaggatcgttttcaggcttcagagaaatgtggagaaacgcctggagtatagggttacagaaaatgagccagggacagagctggtgcggtgatatcaccccatgcacagacttgtctgaatttggaaaatgaggagaaaggaggggatcagagaatcaggaagatgggcaatttgtcagtagggaatgacttggggcaagaaattgcaggttatctttttttaggaaaatttaaaaatcccttaacaaaacatatctagatttgctttaaaaataactgaggccgggcacggtggctcacaactgtaatcccagcactttgggaggctgaggcaggcggatcatgaggtcaggagttcaagactagtctggccaacatagtgaaactgtctctactaaaaatacaaaaaaattagccaggtgtggtggtgtgcgcctgtaatcccagctactcaggaggcaggagaattgtgtgaacctgggaggcggaggttgcagtgagcagaaatcgtgccattgcactccagcccgggcaacagtgtgagactctgtctataaataaataaataaataaataaataaataaataaatctgagcagcagaaaaagatgtgcaaggtatggattaagcaacagtggccatatgctggtaactgcagaagctagtgatgagaacgtaggagttcatcagcctcttctctatgctcttatgtatgtttgaaattttcccttaaaataagttaaaagtgttttactttttcttcttctttttagagatagagtcttgctctgtcacccaggctggagtgcagtggcacgatcactgcctagttcactgcagcttcaacctcctgggcttaagcgatcctcctgcctcagcctcccaagtagctgggacaacaggcttgcaccaccatgcccagcaatttttttagttattgtagagaaaggggtctcactatgctgcccaggccagtcttaactcctgaccccaagcaatccttctgccctgacctcccaaagtgctgggattccaggaatgagtcatggtgcccagcattttaaaaatgtttttctttacaaataattggtgatgttgaaaggtttctagtcgctggaaaagaaagcaatttaagcccctcttccaaaggaagaaactgtaagatcagaaatatgagtttctcctttcagaatagagtcaaggaggaaggtggttaaaggcacacatgatagaactgagactcctaggttcaaatcctgttgcaggcacttactagctatggaacctgaagtaactgatttaaactctaaatgcctcactgaaaacctgggataataacagtagctacctcctaaggggtatgtgaggattactggatgtatgcaagctgggggtttagaagagtgcctggcatgaagaaggcaccatacaaatgtgggcagttactgtgaaagcctatgctagccaggcttagaactgcaaaatgtcccaaagcacatccgctaatagtctctctttcttttttttttttttttttttttgtagagacagagtcttgctgtcacccaggctggagtgctggagtgcagtggtgcgatctcggctcactacaaccttgacctcccgagttcaagcaattctcctgcctcagcctcctgagtagctgggactacaggtgcacgccaccatgcccggctaatttcttttgtattttagtagagacggggtttcaccatgttgcccaggctggtctcaaactcctgagctcaagcaatccgcctgcctcggcctcccaaagtgctaggattacaggcatgagccaccgttcccagcccactaatagtctctttactgaactcactgtgccaacagccactgatatcagagtggaagaattctcccaatgccagtattaataatctagttaacttccctcttgcacatacaaaatccttttatacaattcagttgttctaaatgcttgtgagacattttttagataccttgtaagtcatgtttataaggataattgtgataattaatatagaagattctcttaatcaatgtgactcaaaaggaagcttacaagtgatccttaaaatttcactctggtgtgacaaccctagtgtaaagagaaatgagcctcagttttcttcctactgctgtagattttttaaagtaataaagtgattcctgaaagttgttttcatcttaagctgacacataatgtgatttattttcctgtttacttttccccctacaacaggtttaattgcgttaaatggtgagatgggaggccaagagcccagggaggaggacaggcagagacaaggtgggagaggaccgggttggaccaaggcagagtggaaaatgggagaagggagaagatgtgagagatgtccagcagtcccagaggacaagccctggaagctgatgggctggacggggggcagggatgggagggaggcattcagaatgaggcccatggctccctctgagaacctggagcctggaggggccacccctgagacaaaggctgagagagcatgtttggaatctgggacatggtgagtgttaagggcccaaggattgcccagttgggattgggggattgtccatgaggcctccggatcctccaggtctagggctcagagtagaggtcagggctaaggacagagtgtgtcatctgcacagagataggaaacagaccatgaaagagggtaaggtggccccaaggtgagaagagagaacatagccccaccacatttaacagactggtgaaaacagaggagcccgcaaggaagcaaaacgtagaggaaatgtcaggggatagcagactcacagaaactaaggggagggtgtgctcacagaaggcaggcagggtcaccacagccgatttttgccaagatgaccaataagatgagcaccaaaaagagcccactgagccaggcttctcactggcagaggaaggagttataaagaaagcaagggggggatggtgagaatgaaccctctggtactagactagtgtcagagtatcagtatgaactcatgcttatttttacacaccattctccaatgaaaagaaccagtgactctagaggaagagctaattctagggctggtgcagggagaatacatgagcctggaatatcttgcagtgccagaaagtaagaaggtgttggagaaaaaaaaaagagtaaagaacacaggagccaacctgaaagataaacgctgatggccaaggctaaaacaacttgagcaaaaaaaaaattgattacaataatgttggggtatgcccaactaataaatattcatgagtccacacggaaataaactaatgattgtataaataaaataagtgaagtatgatagaagggacaaatcttccatatggaattctaaatagtaaatgtaaagaaatgagggaaacagaaagtcatcattataatatcacggtaataactgctacagaccgggtccactgatgaatgctaaaatgtgtgggtaaacttgaaggagaaatgggatatttgtgcagcctccaagtatctccctatttccctccaggaatcaggcttagctctcctctgagtgtgggctggatttagtgacttgcttctaacaaatgagtaaagggaaaatagtggtattatcgttgggaaatctgcagacaccactttcatgaagtgatcaggttaacctcacctcagtgagcattcttcccaaagcctaaaatcccagtctaaccacgagcaaaatgtcagacaacctcagactgagggccattctacaaaaacatctcaccagtactcctcagaactgtcaaggtcatgaaaaacaaggaaggactgagaaattgtcacagattggaggaggccaacgagaaatgaccaacaaatgcaacatggtatcctggattggatcctggaacagaaaaaggacattaatggaaaaacaggagaaataggattcaagtctggagtttaacagaatattaatccatgttaatttctcagttttgacaaatatacaataattatgtaagatgctaacactaggtggaagttgggtgtaggtatagggaagtccctgtatcatctttgcaacttgtctgtaaatctaaaattattaaattttaaaacgttcacaaaactttaagtctcctctgcaatatggctcgaggtggtcccccgcggagttccaaagcacgctttgtttgactcatccttcagatctcatcttacatgctccccacgccaggaagtcccacctgacaccacagactgggtcaggagctgcctctggctcccacagtccccctgtggctcccctatcctggccccaacccctctgcctccccatcccagccctggtcactgtctgccgttggggttgtcttccccactggactgtgagctttgcgagggcaaggtggaggctgtctcagccattgctgtgtctcagccattgctgtgtctctcttgagttgagagtaatgcgtgtctccctgactcctctgggaatacccatgaacaggcagaagctgcgcctgaatcctcccaactgacccttaacgcttcacagcccaaggcctgccagatccaccttcctggtatcccctttcctgtttgctcaatccaggacacatctgaggcaatataaatggtctgtctcacccatcagccaaaagagggtcaaatcatctccaacccctgccacacctgcccacccacatgtccgccctgtacaccaagtgtcagaaacacatggtgactgtgaatgtttggggggcctgcccagtccacagcccttctgagcagacagtcatcactataggaaccctccagctccagtgagttgagcagggttggatacccgaccctggaaatcccattcctatctgggaaattcggaatgaagactgaggggctgcgggtaactgagctggaagatcacatagagtgggggcaagagtccacccaggaccaacccagctgcctgagaacaggaagcagccaatgcaaagagaagcagagaccacagggcccagtggaaaggaggaatgtcacaccactgtctcacttctgcttctattctgttctcatgaagcccttgtcaggttctttccatcactacccacaaccaatcacagtgagttctgccttcaaaatgcacccagactccaatgactactcattctgcccctgccctggtacaggccactgtcatctcacctagattattgcagcaacctcctcacgggcctccctgctctcattctcagcccacacttccatctatacaccctcccttagtgatcccatcctgggctttaataccataaatatgccaactactcccagcccagatctcacccttcaatgccagtcttgtataagctcctgtttggccagtgggtccagtcagaggctaaacacgcccacactctctctcagtcttgtccatacagttaatggcactccctccttcctctgtgcagactaaacgccatagtgtggtccttgactcttctttcttaccctacatacctgattctcccttcaaattatatgcaaaatctgaccacatctccccaccgccccgttagcaccctggccaagccactatcatctcagctggactgcacagtggcctcctcactggcatcctgcttccaccctagtagccacatgggagccagaggaaccctcttaccgtggtagatcacatcgcctcagctcaccatgctctccctgccacacatctcatcagcttcaaattcaagtccttcccatggcctcccggtcccacctgaccttgccttggtctccttccctcccactgtgtccagtcaggtccagttcactcctttctgctcctccagcacaccaagcatgcctcggggcctttgaatttgctggttttttctacctggaatgtccttcttcccagaatatacatacagccagctggtgtcctccctttctgtgaggtccattaacgtttttctcaaagaggtcttctttaacccctctatctaaaatagcacctcttcccactctctagtcttccaaccctcaacttctacagctctgttcactaatattagcattcatcttgcccactggaatgcaggctccaggaggacagggctttcgggggtcttgtttgctactattaataataccagcacctaaaaatgcttggcatgtagtaaatagccagatctgatgactcaacaaataagaaaaccctggaatcagttaggatattgttgattctaagtaatagaaaactcaattcaacaatatagttggcttaaacgatagagatatgttgaattccctaatgagaaagtctagaggtaactcactccaagtgaggcctgatccagcacttcaacaacatcaccaaagactcgatgtctttccatctctctactagtccttccaagaaaatggctaaaatcacatcactaagaagtgggttggctggacgcagtggctcacgcctgtaatctcagcactttgggaggccaaggttggtggatcacttgagcccaggagttcgagagcactctaggaaacatggtgaaaccccatctctacaaaaaatacaaaaattagccaggtgtggtggtgcatgcttgtggtcccaagtactcaggagactgaggcaggaggatcacctgagcccaagaggtctaggctgcagtgactccagccagggtgacagagtcaggccctgtttaaaaacaaaaaaaaagaagaagaagaagaagaaaaagaagtggaagtgggttactaatgtgtttattcatctgaccgccacttcttcaacaattgtgaaaattgtaatgctgatgaacatgatgctgataataatagctatcacatattcagtgctttgtgccaggcgctttactagtactttattagcttctgtgtgccttcatttcctcgtttgtaaaatgggaacagtagtagtaccacatacggtgactgaggattaaatgagctaatacataaaatggtaagatcttaaaaaaatattagcttgtttcagttagctattgctgtgtaacaaagcatcctaagccacaggggcataaaatagcaaccatttctttgctcatgattctgcaatttggacaaggctcaaagggtcaggggatttgagatggttcattcctactccacatggtgtcaactggaatgggagttaggccatcccaagatggcatcacttgcacgcctgcacatcagctaaaagttggaacagccgcgggctggggcagatctatagaaagggcagggctccaagagtagaagcagaatctgccaggtctcttaaagcctaggcctccatttagtacagcatcatcttcattgtatttttttttttttttttttgagaaagagtctcactctgtcacccaggctggagtgcagtggtatgatcttggttcactgcaacctccacctcccgggttcaagtgattctcctgcctcagcctccagagtaggtgggactacaggagtgcaccacacctggctatttttttttttttttttgtatttttagtagagatagggtttctccatgttggtcaggctggtctcgaactcctttcctcaagtgattcacctgcctcagcctcccaaagtgctgggattacaggcatgagccaccgcacccagcctgctttcattgtattctattggtcaaaacaaatctcagggccagctcagatataaggagaaggaaggagactccacctcttgataggaaaaacagcaaagaatgtgtggctgtcttcaatcacagctattttaattccacagtaacagccttgtcactggtctccctactttaatccttaatgccttatagtcaattccccacacagaagccagaggagtcttttaaagtacactttagtgtgaagaattttagaaggaaacacacacacacacatacacacacacacaaacacctgaccacgctcctgtccccagcttaaaattctacaacttcccactacatgtggggtaaacacccaaactccttatggcatacacaaggtctgacctcttgctctgcatcagcctctaggctccaaccatcccaaactcttatctcttaaaggagttaatgcctactccttcatcacctcaaacctcatttcctaggatccggatttgatttcctatcaagtattcttataacactctctacctttcttggtaatttcacacgtgtgattatttgatagtctaaattactgtccctattactgtaggttctataggggtaggggaatattttgttctcttctgtgttcccaatgctgaggagaaagaagaggcaaggtgaaatacttgttgaatatcttgagccctcagaaaactttaaggcagctccttggagttctgtagaaaggggatcggcagagtccccgccatgctgggatccagatatgtgctcttcaatagtttatttgataagtagttactgagccctaactgtgtgccaagcacttttctatgtgttggagataacggaggaagtagacaaaagccccttccctgatgaagtcaacagtctcctagaggtaagggtcaggggagacagaccataaacacagataaattctacagagtgttaaacagtaatatgattaatgctaaggataaagttaaagaagcaaagatagatgtgactataagtcacaaatttagaagggtggtgagggaagatctcaggaaggcagtgacatctcaggagagacctaaagaggaaggaacaagtctgggctatttgatagatgagttctttaggcaaagaaaagagcaagcacaaaggccctcgggccagtgtggctggagcacagggagtaagaagagtagatgatgtcagagaggtgatgagggcagacaatgcagggccttgcagaggactctgggttttaccccgagcaagatgtagccttggaagtgttctgagcgggggagggatatgacctgatacaggtgctcacagcatccctccagctgcatgtaaggaacactctgggggcaggggtgagagcagagagatcactgaggagcctgccataatggtctgtgaaggagataagggtggacaggagtgaaggtggggagaagtggtcaggtatattagctgacagacatgaatataagacagaaagaggagtaaaggacaattccagtggtttgggcctggagaggatggggggagcatttactgagatgaacatgcagggaaaaaattttggggaaaggagcaggagctcaatttgatcaaaattactctggagatacctctagattaccaacaggttatgaggaaggcagccagtcaggagctcaggggagagattctgggatggacatagaaatgtgacacataatgggaggccgaggcaggcagatcacaaggtcaagagatcaagaccatcctggccaacatggtgaaatccagtctccactaaaaatacaaaaattagctgggcatggtggcgtgtgcctgtagtcccagctactcgggaggctgaggcaggagaattgcttgaacccgggaggcggaggttgcagtgagccgagatcacgccactgcactacagcctggagacagagtgagactccgtctaaaaaaaaaaaaaaaaaaaaaaagtgacatatacatttccatgcctctcccaaattcctcacaagacctacgtgatctggccctgctgatgtctccttggtaagttaatggtacgcgcgcacacacacacacacacacacacacacacacacacacacatcctgggccctccccttcctaggtattgataatggtcaagttacctaaacttttctgtcctaggtatcatttacaaatgggagatcacatcagcacctgcctcctaggattgttcattcaagacattagccactgagcatctgctctacgcgctggagatatcccttctccactcctctccgcctccccctcccacacagcctgtcaaccttctggacgtctctcccatcccctcttgccctccctacggtggcccctgccctgatccattcccaacacctcttgcctaggaatctgtcacatctgccaccctgggtttcctgaccccagtcactttcccgttaatctattctcatgtcacagcaaactgggccgtaccccttccctactaaaaatcctcccatggctcttcattgctctcaggacaaaatccaaggtccctaaatgatcaagaaaatcttccacatctcattcatacagaattttcagtatgatcaccaacaccagatcgcctgcagtccatgttcacacaacaggctgtttctctctgcctttgcgcaaaccattccaccacaccgcccccgacccccaaaacatccttccgtcttcaggtctcagctcagacagctcctagtcttccgggatgatcttcctaccaaggtctcctcgggttcccaccgcgttccatgccgcctccattagtgaacatacataggtccgcaacggggtcttgcctgtctctcccactgagcggggcttcccgcaagccgggccaggcacagcggccagtgatgtccgcgtgctggggcctcttcaggcctcggcgtctactgcccgctctggaactgtgagcgacaaccggcactctctcccgggacggcgccgcacccaccttctgcacacctcggagacctcaacacctgcgccaaagccacccagtcacagccttctctccctctcctaaacaccatgaacatccaggccccgggacctcagactgctcattggctgcctgaaaacccgcccccaagcctgagagaaaagaactctggttgctgtagttccccaacgaacaccgcagaaagcgattgctaagtagaacttcatttcccacaaagcgccgagccccagtggtggcagacggtaccctttgaactgggctcttgattggccggttgggagacgtacatttccaaattaccgtggaaacaggaccacttacctggaaccccgggaaaatctttttgtctcagaatctcaaaactctttgtttcgcgatgattccaaagagctggacagtacacgtggggacagagtctgtacctattgtctgcctgttccccagatggcaccaacaaagcctcctaagtgtactcagctgctactggacgcctgcttggcatgaggagccactcttgtgctaagtctgcggacgccccggcttattagggcacctgtttcccagagacaggccagagctgaacctttaccctttcagggtctatttacccaggaaaaggcaaatgtaggccaggatcctgtccacgatctatctagaatgctgatgccccagacctgcagactcatgcctgcaacacgcgccacagcttccccacgagacgtctccacaccagagctcctccagcaccccctccgcaaacccccttccccaccatgcctctgagggtcgggtgaggggagccgaggccctgcaaacgctcaggcaggcatgtgagaaagctctttactgggggtacagcgaggaggagcaaggccatctccccctacctgcccccaccccctcctagggtcctggggtgagggggggtcttccctccaccggaccaccactgtctttggtacaataaatagaaaaaaagggggagaggggcccaagggtccagtccttagtggggagggagcggccaaaaccctctccttgacccccctgccccaggccccaatcagtgcaggcctcacccaccccagctgggtagcagcaattccagtcaaggagagagatgaggatgggagcccagggcccccagatgggggagggtatggcttcaggaggggccccagggagggggcagggtcacgagctggctgctgtgctctggggtacaccacggaggcccaggtgaggccccagagtggcagggtcatcaggaggcgggaggggtggacgacctccagtcatccgagtccggagggctgaggcagccgggtgctggggggcaggcgctgggtgaggtggggagcagtcagcagggccgcccaccaggctcacatccatcagctccgggggtggtggtgaggttggtgatgggggacgaccaaggtatcggggctgggggggtaactgggccccggtcccaggcagtgacgaggcagaggcaggggcttgatgtgtcttgtggggcacatcaccccctgcccagggccgcagcggctgggagggtgggacctaaaaaagcaaaggagccatgggtgatggagaccctggtctctaagccccaggcaccaccacccacctccaaagcccccaaagccccattacctgggggctgttcatctcacagtctgtgatagggggcccagggcccccacaatatcggttgctgtagcggtaggtccggttgtcactggaggagccactggagcctcctggaagtgccagggaggagaggtgaaggggcataaggtgagagaaggtggcgagtgggttttgggatggctgagggaaggtcacggcccaggctcaggttcaggcttcaagagcagagcccatctgaagcaccgggcccaattctgagattctgggttggaattcagttttgggttttagagtcagaaccagtttcagggctctgagcccaatttcagtgattgtgtcagggccagttggagctctcccatcccacacgtcatcttacagttcaggatcagtttcggcgctttgtgtgaagacccagtaaccaggtcccccaggacaggccaaacctgagcagcccccacccgttgtaccccatttgggcacctgggcacccaccagaactggagatggagctggcggtgctggaagaggggcaggtgtcgaggggcgcgggcgaggtggaggcactgctgcctgccgggcccgtgttggtggcctcgtcggccgtgcggcggaagaagccgtgctgcagagcccccagggggctgatgcgggcggcgggctcatactccagcatgcgcagcaccaggtcctggaagcggaggtagtcggcggggctgtggcccggctcccccgcccgccggcccccgggcccgcccgtctgcacgcccagcacctcctgcagccgccgtgtcccggggccctggtaatcctggcagggagggggtgggagggggggcaagagagtggccgtcagtgggcaggaggggcagggagacacacacggggaaacagaggcacaagagagaaagtggaaagaaaagctaagaagagttgtggggtgggaaggagagatgggagatggggtgggcaggggaggaaggaaaggacagacaagggggagtggaaggaagggaaagacacaagggagagggagcagggggagagagccccaagtgtgagtgaggggccacggggtgggaggagtggcatggggcaggggccgcaccttcctgagttctttcgtccttcgtagggtccagccacccccaggcagccgttcaaagtacttgcgagccttgggcgcctggtccagcatggcggccggtgggatgcccagcacctccacaatgcggttcatctggtcgacctgtgagcaggcaggggtcaaggtcatcaggccagccaggctccaccccctccacctccagcacaccccttcctgggggcacacctcattggagccactgaagaggggctctccggtgtgcatctccacaaggatgcagcccagggaccacatgtcaatggccaggtcgtagggtgtgcccaggagcacctcaggtgagcggtagaagcggctctggatatactggtagatctgggaaaagggtaatcgtcaagggacccagcctcccctactggtcccactgacacccccaaagctaagaggacccaactgaggacaggcttcttgctgacaaaatggggactgaggctccaaatcctgccattatcagcaccaattttctgggagccactggtgccatcttgtttatcaatctggggagtctgctggcctagacagaccctgatctccacccccaacccggatcctgggcccttctgggtcaccaggcagaggctgacattccataagccctataccatcgtcacttttagtggcagctcatacagagctgcaaagttgaagccttccacctccatcctcagctttaagaacagagaagacaaaaacttagcgaggcagcacccctggctcaaacccaacccaacttcaccctgttcacatctggcagcttcaaaatgggccctgcccctcaggcttcacccttcccatcctagtgggcagtatattcacacccccaccccaagcattatccctcagttcccacggctcctaataatcccatcccagccaagccccgcccctaagcctcccgttggctctgccccacccaaactactagccgtgctcccaggaccgggccgccccctaccctctggccaagctggcaggagctgccgaagtccacaatcttgatggcgctgcgcttggggttgcacagcaagatgttttcgggcttgaggtcgcagtgaatgatgctgagctcaggcgtggccagaaagagcagtgccgtgcagagctgctgcgccagcttccgggtcaggttcagcgagacgccgcggaagtgggtgttgcgcaggaggtcgtacaggttgtaggacagcagctcaaataccaggcacaggtggttccggaacatgaagtgccgcttcaggtgtactgcgggggaggggaggaaatgggccagagaagaaacggctcagagagggcaggtggtggcctggggtcatacaacgctctttgattactagccacattgtgctgtccccacgggtaccatctgctagtcaaaatctttttatctaacaactagattcacacaggaagttaatgctctttccaagtctctgtcaaaccctccaattaaaccaaagagaaagtttcattagttactactagctctaacacattctacacttcctcatttaatttcataacactgctttcatctcccttgtattcatttttgtggcaaaggacactggttttccgtttactttaaggatatacgttttcctttcaaacgaaaccattttaaaatccacttgctgtttatgattatgttgtgatgtttatgtccatgagcaggaatcagtttaagggaggagaaagactggcacagatgttaagagtaacagctctggagtccacgacctcatcaaattatagctcaattagtacaaactgccacctcatgcaagtgacagcacttgaatgcctgagtttcttttttcctttcttcgtttttttttgttgttgttgtaactgttgttgttgttattaggtttggttttttgtttgttttgggtttttttttttttgagatggagtctcgctctgtcatcaggctggagtgcagtggcgtggtcccagctcactgtaacctccgcctcccaggttcaagcgattctcctgcctcagcctcctgagtagctgggactacaggcgcgcaccaccacatcaagctaattttttcacatttttagtagagacggggtttcaccatgttggccaggatggtctcgatctcttgatatcatgatccgcccacctcggcctccaaaagtgctgggattacaggcgtgagccactgtgcccagcccgttttgtttgttttattgaagaagaaactaggatggaagcccaggtttcttatcttcaagatgttgttaataatgcccttccccttatgggctgtggtgagttaacttccaagtgcttccaagagagcctggcccttggtgagcactcagtaacctctgaccattaccaagaaaataggacaaaaatcataaaagcagcaggagaatcactgatgtcagagaagcacagaccaaaccctgctctgaagacatcagcctcctcctgagagtagggcgggggtgtgacccatccctactggctccagctcccgctatcccaggtgcccacagccctgccagtcccaggcctcacctatatagtacttcatctccgtgtcatgctggttcatcagctccagcagccgcagctcaatctgggcctggttcaggaaagcctttttgttcttgatgatcttgatggccacaagctcctgggtctgatgatcataggctttcaccacctgttggggcagggcatgtcacgaagaaaggggtgggagcagggcagagccaggcaccattcttctccctccaggcaaggagacccaccaagaacactatgcatacttcgcagctgagtgcgcaccattagtcaggcgctggtgtaaacactggatgtgaaataacataacgaccttatgttgagtcttgttatttaaactgttttacagaaaaggcgactgaggcacagggaaactaagtgggctagggtgagtggcccagcatgggacttgaagccactgaaccactgggtgtgtgatcaatgttagtggggccttggatcagggtggtggggggtgtcccacacctggccaaaggagcctttgccaatgagcgagtcaatttcgtagcgctccagccagcgctcgccactgcgcacgatgtagtcatggttgtcgtcatcataaccatggttcaggaccttcttctccttcttgttgctcgaatcctggggtggcgcctgctgggcccgccgcttcttcttcgcatagtatacctgcccagccagccagccaggagatggggactggtgagtgactcatgccagcagacaagaccctcggcacccagcccaggatcccccagcccctgcccacctcattgatgtgcttgtaggtcttgatgaggtccacagagagcttacgcagcggggctgaggttgcatcccggaaggccaggggcagcctccgaggcagtagccgcacatcaggcaatacctgcagggcagggtgaggggtgggcactgaggacgtgccttcacctccgacctcaagaggaagaactgtaagggctgctggcacatcatgtatttggttgctgtctgtatttgttccacctgtctaggaaagaaactcccccagggctgagactttctcttgttcttactatacctccagtgcctacagcagggcctggcacacaatggatgctcttagagatctgtggtgtgaatgagtgaactctgacctttcacccctcacctttactcctttctgaacctcagagggagagatcatatggaaaacctgggctctgttcctccccattcttcactttgaagccagccattttgggtaccctctgaagtacctctatctcaatttaccctcatcccttgggcctcaacccatactcccaccaactctttgcacagttctttcaccccaaggctcttggatctggatctggcccctggacctcccacttcatcctgcttcaagctctgcatgtcactgccttcactgcctctagccttgggagagctttgccctcaccacccatgcctgttggcctcaagaccctttagactcaacccccctccaaattcacccaatccagatctttcactctgaacttttcttagtagcatttattgggtatttactatgtgccaggcaccattctaagtgttttacatgcataccattaactcatttaatcctcacaacaaccctgtgaagtaggtatcattattggccccatttcacagaatgagttgagttctccaactcaagtatggagaacctaaggaatttaaccactgggtcaggatttgaacccagcctctccaaaccctgactctgcctgaaaactcctctgttattttccaatcccatgggacccattatgtgcccagaagaatgtcttgggcaaccacactaccttttggtctggagacctttctatccccagcctccccctaccaccacgcaggtgaggagccagctgaacgcgtacctgcgtgtgctcctggggccctgggaagccagagaagggaccatggcccggtgggacggccatggtgggctcagagggccgcaggggagcgaggcctggagcgggagcccggccggggggcgccttcttgcatcctgcacctcggctgccaccgccgctgagacctgagagcagacaggaagtgggaaaacaacatggaacaaggggatatgtgaatagtgccaggcggggaagagtggacatgagaaagacagggcacagagagaagaggaaaagggcacaacggagcagcagatagcaatgaagagaaggggcagagaagtggtagccaggtggggggggatggcacagcagtccctcgacaaataatgatcaagtaaatgattaaggcagcacaaagagaacacataaaagacaatgattgggggccaagcaggggtcgatatgagccatcacagggaaaggaggacaggaagacaccaataattcagaggaggaaaagaaaaaagaaaccacagacagtatgcagaggagtaggcttcattcttttctcactactcgtggccctccccagggcccctaacacaagatgccactttctgtagtcttccctgaacatcaggatctcagcccgtagcacagccagggccaatactttaagatctatccttctcagtagattccctcaacccagagaactctaggattcccaaaccacatgagtcttcccctcccaaaccacagcagagtcctctgcagccctaaaaccacatcagcgtccttggggacctcccaaccacaccaaagttatctgagaacctctatagaacagagtcctatctctacagcattctcatccaccagggcacgattttcctaggggaccctctccatatcatgccaagaccgcttccctatttcaggtcctccatattaggaaccagccttccaggtagtctccctgtaccatatcccaattccccctaccacaacagggttcttccccatattactccaatatcccatcccaatcaaggcccactcctcctgatgggagaaggaggaggtgtctcttcccacagtttagagtgatcatccttttctcccctacactgcttccttgcccccctacacacacacacacaccctaatattcctaccacagacctttctccaggcacccctctttataccagggtcattccacaactgtgtccactcctagagggcctcaaagtcaaatccccaagttatcacatagggttctctcctcccagagttgtcagctacagcaaaaatcttctccccatgggccactctctcccccatgtcaaatccctttctcctattccatgccttgccactccacgactcctccacccttggagcttcccccaaaaaaccacctcttctccggggccctcccacaccaggatcatctctcccagcccccaccccctacccgggtcagggctggcgcggggcccacggggggctggggcgcggtggggcccccagtggggtgggcgagcggccagcatggcggcggtggcggcgctgaaaaggcgaccgcctgtctctggcccggccggccccgcggcggggagggcaagcgggacaggaggcccggtgggtgacaacagcagccgccactgccaccgggggcggggagaggaggggacaagggtcagcccagggcacgcgggggaagagtagagcaggtggacgggggaggggcgacacgccccaccctgagtgaccaccagcccctagggacccggcgtcccgccccccacccaggaggccctcctgggcctgctgagaccggaaggcggggcccgactgagcttggcaatcggcacctgccatggcaacaactgtaccattggtcgctggtgccaagagctcagccaatcacagcctagggcagctgttgctaggcgacgaagaagcggcccgcggagctgagcccaaacaaagggcgggagtggggcccggctaccccctcccagcctccctcctgcaactgcttcctcgggcttggccggttccaggaattcaactatgaatagccaggcagggcccgcacctgcctgccacccccctcctctcctcccttggcctcgtgctaagtctcacggcgacgggagcagggcggatcccgtcctgcccacctccctgcgaccgcttgccgccccacccgtccccgcgccgttacctgaaggagcgggcaaggggactcaaactgctcggggagcccgagctcagacctgcccactggctgagggtatccggcggacgcggcaagccagggccccgattacccagtaatgcaaccagcaaaatggcgaccacaacaaaccggcccccccacgccctggactccgcccccatccctccctctccgctcccctcacgtgacccacactgacactccgcctgcgcgagatggccgcttacctgcacgcatgcgcagcgagctaccaatcccacccaagaaccgaaatccaggctgccgctgcgcaaaggcagctagaaacggagcatgcgctctgtgaccgagtgagaatttacccaaccccgcaaaattgaccaagggtgcgtgctccctgtgtcagcaggtcaaggggaggaatgagcagcagacatgggagacggatgagtcttttaatagaaaaacacacgtgcaacagtatcaacacacatctctcgcaatcctgacagcgctgaacttcagttcttcaccttggggggtggcctgtgagaggaagataggtgatgaaggagggtccccaggatcatggcactcggggtgcaagggacagagatgtctgtcttggtgtattgctgggcccctgctcacctgtacactcccacgaccacggcatggtctctttcatatggctcaagggtcaactgctcctgcggcttcatgttctcctgttgcatctttttcacttcggaggcaaacacggcctcggctgaggctgtggagtcaatgcagttggcctaaagaggagaaaggactaatgtctacaacagggctttgggctgtttttctcttgtgtgctctttaaaccagatgttttcattattaattcaagtaaaactcagtgctatggttctagtgtgtcccccaaagttcatgtgttggaaacgtaacccttaaatgcaagagttgagaggtgggaccttcgagagatgattcaggtcatgaggcctctgccttcctgaatagagtaatgctattatcacaagagtgggttgctgattaaaaggatgattatgccccctttctatcttgctctcacccttctgccaatggatgacagcaagaaggccctcgccagattcagacctccaatcttggactttccagcctttggaactgggagccaaataaatttccattcattataaattacccagtctaaggctgggcgtggtggctcacgcctgtaatcccagcactttgggaggccgaggtggctcaatcacgaaatcaggagattgagaccatcctggccaacacggtgaaaccctatctctactaaaaatacaaaaattagtcgggtgtggtggcgcacacctgtagtcccacctactcgggaagctgacgcaggagaatcgcttgaacccaggaactggaggttgcagtgagccgagatcgtaccactgcactccaacctggtgacagagtaagactccatctcaaaaaaataaaaataaaaataaaaataaataaattacccagtctatagcattctgtgatagctgcataaaatgggctaagacactcgggtttaggaaatgtgataaaaggcttaatgaaagtttttggctgggtgcagtggctcgtgcctgtaatcctagcactttgggagcctgagacaggcagattgcctgagctcaggagctccagagcagcctgagcaacatggcaaaaccccgtctccactaaaaatataaaagttagccaggtgtggtggcacacgcctgtagtcccagctacttaggaggctgaggcagaagaattgcttgaacctgggaggcagaggttgcagtgagctgagattgcaccacttcacgccagccttggtgacagagcgagactctgtctcaaattaaaaaaaaaaaaagtttttagttttgttttggatttgaagcaggaagccttaaacagtcctatttatctaaaagccagtgcttaaattttatacccaggaattgtttggcttatttctacttcctcttctttaataatagtaataatgcagttgagaataataaaacaaatgtagcaaaaggctaacaaatggtgaaccttgtgaagggtgcatgggagagttctccattatttccaaataaaaatgctgtgaaagatgcacctagcttttatctagtatctattctatgccaggatcttttctaaacacttcatattatattgactaatttgatcctgtcatctaccctgaaaaagactagacaatatttctatttcataagtgaggaaactgaggcatataggttaagtaacttgctcagtcacacagcaggctgggattaaactcagatggtcagactcaattttgcacttgaccgctgcactctcctgcctctttaaatccaaagctatagttttgcagacttggcccctctgttttgggtggctatttgacagatacagatagagaagatacctccctagaacactgccaccccatcttagactcttccaaaccccgcaccttaatggaaatcacaaagtgtcctccattacgcaggaaggtgtgggcattcagggccacaatccgggtctggtctggctgggccacatcagcaaagatcacatccaccattgctaaggagaaaggagcagcagttaaaagttggagtcacagggatcaccccagatcctcccatggggcctatgcccatcaccagcaggttcctgggagattctccctgcctccagtttcactccccacctccactggtccccctccctccagtgtcccaagatgagtccaaaacccacagtcacatcattcatccactcttcttgtaaaccatggttgccacctactctgtggccagccctgggccgggcgtgggggacatagagacgagtcagacccggaccctgccctcgagacgctcccaggtctggtggggagacagacacgtcatcaaaaagacaagtaagagtgagtgagcacttataggcaagagtgtccgcaggactgtgaaatgaaaacaagttgcagaacaaaggggatggtatgagtgcatgggaaaaataaaacacagaaagaaaaaggagcagaatgaaaaataatgtttttaagccagtgtgacttttcaaaaaatgaaaaggtggtataatgaaaactgattatttaaaacctgggaaaagcagacatcaaattgttctcatcagttacttctggcggtggtttataaggcttttcaacttttatattatatctttgaatgtttttttaaacaaagtaattaatattcacagtgggcccctccagatcaagccatgcttagttttctgggatatgctctcaccagacaatgattaggacccccaaaaggaggctttttatggaggggtagtgtaataaatacaagaggcaggaagtacaggagacctaggagatggggaggagactgaaggagaagaggttggccctccaagggtggcttccaagactctgaagccaagctgccacctccacaacctcacctagctccccttacccctttctattcctgcagactcaagaggtctgctcatccactccaactccatccgaatcagagatccactggcttcttccagaagcctgcggtggcctgtcctaccccaccggggccacccccagacccctcaccgatgagcatgcggtatttgtgtgggtgtcgagcatcctcgatcacaggaatgatgttggtcctcttcttggccaagttaatgaggtcacggccagagcggtgggagaactcgactgcatagactagaccatcctaaaataaattaaaaattaatgaacagtgatgctagttctcatgcatggagtgcctactttaggcccatacactatacacagcatctcttccaacccccaaatcaaaaccctaccatctaatgactattgctatcatgtccatttttcacatgaataaactgaggtccagacataaagtcactggccaagagttattcagcaagtagcaaaagtacccaatcccatctgcctgagagcccaggttcccaacagaggcttaaaaccaggaagccaaggcacagagatgatgtaacaatgggccaaccactgctctaagcacctttcagaaattaactcatttaatcttcacaagtctatgttccagacaggtaaactgaggcttggatgggttaggtaacttgcctgattaaagcctgaggttttttttttttttttttttgagtctcactctgttgcccaggatggagtgcagttgtgcgatctcagcttagtgcaacgtccgcctcctgggttcaagcaattctcctgtctcagcctcccaagtaggtgggactacaggcacacgtcaccacacccagctaatttttgtatttttagtagagatggggttttaccatattggtcaggctggtctcgaactcctgacctcaggtgatccacctgcctcggcctccgaaagtgttgagattaaaggcatgagccacctcgtctggccaaagcctgaggttttaaggcactacacttaacagcttataaacacataaagtaacaaagggtaacagagtgggacacgtgggtgccaggggccctctaaatgggaagcctatacaggctcagaaaccatgaagatctcctggttctttctaaagaaaccagaagagcaggttttagcagcataaaattttaaagaggcccatcaaatcaaatagtctggtatctatactccccgttgtctctctaaggttggtcaccccacacccacgtctcttcccttgaggccaagaacccaggagtgaggttgaatgacattatctggttcaagccactccttttactcacaggcacagtgacagaaaagggcctggccctaagtcacacagcgcaggcaagcagtcaaaccctgatattccaggttggcagaagggaggcagcctttacctcctgcctgactctccatctactcactcaccggaccaacgatgtcagagacatgggagaccgtggtgcccgaggcagccccgaggtagagaaccttagcccccggtttgatgtggatctggtccacaccacccaggattgctgctgctagcttggagcggaaggggttccaggctcggtactcaattttgtcatctccttcctagatgagagatggggacagaagtcagtgctaggctcttctgcaggacctcactgcctttaaccctaggagccttgaaaggaactgggctgtcctatcactgcacaagaactcaacatgagtaaagagcagtgaccatgcacatgcagtcgctgccctctcatggaggtgactgacccaaagggcagcaaaagagaataaacacaaacagtaacagtaaaaccagcacttgttcaacaaacatgcactgtgccagcacctactgtgtgccagaccctgctctaggcgctggggatacaaaacaaggatccctgcccagaaggtgtaagtattcaccgaactaactaaatacaacatggcatatgagatggtgacaggtgttaaggagagaagacaaagccaggagagaagatacggagtttgggaagcagggcaaggagcaggtgaaaatgggaaaaggggccagggaggggctgaaaggcagattccaaatcagacctgaaggaggcaaggggccattcaagttatctgaggaaggacattcccacgagagggagagcgattaggaaggccccaaggcaggcacaccctggcctcaaagaaaatgacacaggataacaggacaggggagggcggtgagggatgccttgacccgcagagtggtgtgacgcagcctggagaagcagatgataaggacgcagcctcccacagagctgggagtgggaacagcaaggccagggtggctggaggacacttggtcagagagttagtgaaggagacaaagccagggggcagggagggggaactggaatgcacagggtcttggaggcctgagtgaagactcaggagtctaactggaaggccgtggggagtcacagaaggcggatgagggagcagacagtgtggtttacatattatgacaatcctccagctgtcacgtgcaggacacatggtgagggcagacacagactactggctacaccctcagctgcgaccctggtggcttggacaggggcccagttctcaccgaaatcgagactctcttctctccataaactgattccccagggaccaggttcttggtgaccagtgcatcttcctttcctcgacaaatgaagacacctgggtgaggggatcagagcaggggtgaggacccccagcctctccctgccccgaagctcagccggctccctgccttcctcactcaccctcatgccgatgcggctccaccatcacattcttccccgactggtttcctctttttcctccccgaccacgaccccggttgccaccagaatggaagcctccacctataaaggagaggtacaacaggagagaaagatcctgaatctccgccctccccactccccacctcaggaaggcctcctctgtaacccctagccaatcttaccacctcttcctcctcctccaccgccgccgccgcctccacctcctcctcgtccacgacctctaaagcctccgcctcgacctcggcccccgccaaagccccctcggcctccacgaccaccacggtcaccaaagccccctcggccgccaaagccacccccacggggactgaatcctgtgggggaaacaaaacaggagtcagggcaatgaagcttaaaaggttaaaccaccttgtacccagcaatacctctcaggtgagaaacctgaaatacatgtgcccgtgtacagcaggacacatttccaagaatgtccacagcaaaagaaaagtgaagactaacccaaatgtccatcaatagaatgggcaaataaaatagaagacattcacaatcaagatcatgaaaatgaccttcagttatacacaacagactaataaatgttaaaatcataataattttttttgcttagtgctttttttttgagacagggtcttgctgtgccgcccaggttggagagcaatggcacaatcacagctcaccgcagcctcgaactcctgggctcaagcaattctcctgcctcggtctctgaagtagctagattacaggtgtgtgccactactcccatagtgtagagatgggggtctcactatgttgcccaggctagtctccagctcctggctcaagtgatcctcctgccttggcctcctgaagtgctgggattacaggtgtcaggcaccacacccagccacaatcatactgcccaagaaaaggagcaagggaatgagaaatgtaaaactcatgatattggtgaatgggaaggagatattaatatggggttgggataggggaggagtacatgaatagatgtaggttactgttaatatcctggtttccttggttgcatagcagattcacagaattcattccatgtcaatattaattactgtgaagagtgagccctgcatacgagcacatgctgtgacaacagggccccctagactctgcaaacgtcttcatactctcccactcctgaccttggagctggaagaaaagtgtcaaccccagccccaaaacagaggggaatacaggatgatgtcagccctaactcatctccctgcttccaagcttaaagaagtccctctcagctcaggggaaaaacaagaaaaagcagaacaaactgtcatttaaggataggctgcactttacaagtagtttgcgacttgtcagtaagatcgaaatgtttaagaaataacagactcagacaggctttattcttaccagttcaggacaacaaacaccattagcacaaaacaacgtttaaaacagaactctggtgctaacagattcaatattttctctgatttggtttcaaaaactcagaagtactaaatcacacaagttaaaaaaaatagttggaaaactagtggtttaaaattatctcacattctcacatgatgtaatctattcaatcataagcttgcttttttttttttttgagacggagtctcactctgtcacccaggctggagtgcagtgacacgatctcggctcactgcaagctccacctcccaggttcacgcctttctcctgcctcagcctccccagtagctgggactacaggcgcccaccaccatgcccggctaatttttttgtatttttagtagagaaggggtttcaccgtgttagccaggatggtctcaatctcctgacctcttgatccgcccgcctcagcctcccaaagtgctgggattacaggcgtgagccagcgcgcccagccttgctcatgttttttgtaaagatacattatgatcttgtcctacgaacccttcatgcaccttaatggtattaaagataaaaaatgtgtcttttaacagccattcctaatttaatctttaaaaatgaacggtttcattttcaaaactcccaaacaaccaaaagttgtttacttttaatcttctactccctctacagtccacttttcacacagcagctaatacatgctatttttaaaacagcaagtaagatctcatcatgcccttgcccaaatccctccaatggttttccaccacatccaaaatgaaataaaaagtcctttccctggcttacaaagcctgaaatcaaagcctaaaatctttaggctttaaattctgatttcattgttctgggcgcaaggtcttcccctaaagctctccaggtgactccaaggtgcagcccacattgagtatcatcatcctaaggatctggcctgtgctgacttccctgacttcattctctttatgctgggccccatgctcttccccaccaagcatacacagtccagcttctaaatctttaccacgtgctgttcccactgcctggctcctgcagacatgtgcatggctcactcgctccttcactgcattctggtctctgataaaatgttagttccccagaagggcctactttggccacagtacccttaccctgctttatttcccttcaaatcaattatcacacatggcatttttaatattattaccacctgcctcccccactaagatcaagctccaaatgggcagggatttttaactgttttggtcaccaccgcatccccaaaaccctgcacaacatctggcacaaagtatgggctcaataaatgttaaatgagcactgagctgatgactcttaaaccctgggccctgcctcaaggagaaagcaccctctatttgttcagaaagcacacaatccatcagatggtgaccagggaagtgccggtcactcccctcaagtatcgcatatggagagataggcaatgttgctgccactctcgaccctagtaaggaaggttcataggggtcttgaaaacttcatctgtaagacatggagacaatacagtgccaggccacgcgccatagctcatgcctgtaatcccagcactttgggagacccaggcaggcggacagtttgaggccaggagttcaagaccagcctggccaacatagtgaaaccctgtctctactaaaaatacaaaaaattagctgggcgtggtggcgcatgcctgtaatcccagctactcaaaaggctgaggcacaagcatcaattgaacacaggcggaggttgcagtgagctgagatggtgccactgcactccagcctgggtgacagagagagattctgtatcaaaaaaataaaaataaaaaaaatgcagtgctcatcctatagggttgtaaagattaaatgacttgtacccacagagcacatcacatatatactatctggcacctactttgaacatcatcattcaaactcaggggtacgcgtctcctcttccctcctcatgtaccaaaagtacccattcctcagaaaaaacacatgttcacacaaacttttccagttagttcttttttcatctttctattaaagatgaaaatgtaacttttaatagctactcctaatttgatcttttaaaatgaagtttccttttcaaaactctagaacataactaagagttgttcactttttaatgttctactccccctacagtccactttccacacagcaactaataagtgctgtttttgaaacagcaactcagatctcaattttcttgcccaagccctccaacagttttccaaagccaagaccttcatttaggggagatgccacagctaggcttatgaaagtctcaacccaggcctaacagaaaggaagtactggcatgtgcttggggcggagtgggcatgagtgtaaactttcaatcccagatactcaaaacatctcaatccgtttcaggtcctggagcttttgggggaaaatgtaccaaaagtacccagtcctcagaaaaaacacatgttcacacaaacttttccagtaagttctttttttggggggaggggggtccataaaccccctgatttaaaatctgctctccttccacagccttctccatctcaaaaatggcaattccatccttccagttacacacccccaaacccttggttatccttgactccgatcacacacccacatacaatctgttggttctgtcttcaaaagcatgtaaaactgtcagcatgtccactgctcccatcctggtccaccacaccatctcctagattacagcaacaagcttcccaccaatgtgcctgcttccacttttgccaccctgaggtctttcacacatcgaagcaaaaagaatcccttttaaaaatgtcagactgcaccacgcccctgctcaaaaatctcccaaagggttcttttctcactcaggctaaaatccttactaaagagctaacacctgacaacttttacaacttcacattctaccacacatggaggaaggttggaagaacgggtatcctccatttatgagggaatcacagaccagaatgcctgcaggcaagccaggatctcagcatacctggcctacaatcccccaccccacttcatcaagagatccccaaacacggaagagaaagggaacttgggagaagggcacagatccacaaatctcctgccaggtgacccccatctctccacacaaacacacacacaaaagaaaaagaaagcctgtactaggaaaacagaccctttgggccatggtggaaattctccaaactcaatgaagcaagttctcacacagatgagtgcgggttgggcaggccagatggaggaagtgctcaggcaccaccgagaaggattctaatgttgttctctttgagaaagataaaggtaacaattagagctaatactattatatgtcaagcactgtgctattttttttaacgtcgcttaatcctaactggcgccattttattgatgagaaaacagaggctcagagaggtaaagccacttgcccaagttcacacagcaggctaagaagctgagcaagagctgacacactgaactgaggcccttctgctgtcaaagccaggaccccctcatcattccaccatgaagggagtggtttcagcagaatctagtggaaaatcttaagaataaaactacttacctcctgtgacaaccacccgccccaccaccccagactaatgccgagcttgttaagtctcgtcccggaggtggaaatcttaatccccaaatctccactccatccccggggatccgccccactgtaagtgcagaaggcgggaaagtgagccgaagagcgccgcacacggccaaccggggagtcctcatccactccggcccactcggaaaagctgggatgcgggataaggggatggtggtggtggcagcgacagggaaggcaaatgggggcttcccacacacagctccaggacccaaggtcaggaactctccatctccgacccaagcctgattcccaaaacacgcccagcgatccaagactccagatgcctgaatccaaactctagcccaagacccttgagtgccgcctcctgcccaatatccaaaatccctattagacggcctcaatgagacgaaccccacgtcaacacccccaatgccaggcccacggccttcttcgactcacgaccgtgacctctgaagccagtcacaaacccctagacctgctggaatcagaatcccccttcccacaggagactggaacccgtgctcagaacccctgcccccaggccaaggccccacccctccgattctggcctggcacccggattcccgcccggcctccgtccctgaccccggaccctcaccccagcctgacctggcttcatggcgagccctggtttgtgcggctccggagtccgcggcgttcacaactccacgagtccggggctttcgcacgtggaaaagagcgcaggcgcgcggcgacgtgcgctgcgtgacgccaccccgtagtcccgcccccgggccccttccccgcccggagctcggcgcacgcgcagtgagcctggattctcgagcctgtcgacacgcaacccgctgccctcgctctctgccttcccagcctttgcctgtgcagcggtcgccctaaactcgcttccggtttcctcttccccaatgcgagcaccccaataatcagggctcatagccttcgcacgggctgtgccctcttttgtattcctagctaaatccctctggcccctgtacacccaaaaaggcttccccaatacatttccagccccaagaacagtgaccgactctgggcttccattcaaacatccgaaaaacatttacagtgcacctcgtgtgtaccaggtgctgttctaggagctgggaatacagcggtgtacgagacataaaaatctccactctcctggagttcatctttttaatggaggaaatagacaccaaacatgttgaatgtttgaaagcgataagtgctttggagaaaataacagcagggaaaggggatagagattttggagggcaaatgatttttgtttttttggcacggtggtcaaggaatgcatcaggagacttttgagctaaagggctgaaggaagtgaggagtgaggcatgcacctatctaggggaagagagttccaggcagggaaaagatctgcagatgcagaggccctgaggaaggaaagatatgggaagttggagagacaatgaggagggtgggtggggcaaagtgagcaaggtggagagtaagaggagataagggcgggtagctaacaagggcagattgtgcggagctttgtgggacatagtgaggacttaggcagtaagatggaaccatggaagggttccaagcagagaaggaatgtgatctgacacaggtccctctggctgcatgtgggaagcagactgcaggagtgagggtgaaagcaggaaaaccaaggactggctgctgccgtgaatcagaagaaaaggatggacagatcagagtgggggcagagagcggcgtcaggggtcaacagattctgcttaagtattaagaattttgggctttgtaattgtgtaatatcagtatccatccctatattcattctgcaaagcaagacaactgctgttatgagaagttaccgaaaaactccagaagaacctaccagtccagagcctagatgttgactctgttccattcactgctctatcactctaggcctaggacagccctctgggtgcccagtaaatgtttgttgaatgaatggatggcctcataccgttgtgagttctctgtgtacagtgttccagctgtggaatgccaccaatttgcacagaaacattcctgaaagattgtttagatattatgatggaaaatctgcttaaacttttcagaaccggtcggggcagtggctcacacctgtaatccaggcactttgggaggccgaggcaggaggatcgcttgagcccaggagcttaaggccagcctgggctacagagtgagaccttatctttacaaaaaataaaaaattagctgggtatggttgcttgcacctgtagtcccagctactcaagaggctgaggcaggaggatcctttgagcccagtaggtctaggctgaaatgagccatgactgcaccactacactccagcctgggtcacagagcgacacccctgtcccaaaacaaaaacaaaaaccaaacaaaaaaaactttttaaaaactatgagatgaaatagttgagtctattctggatttctagatgtgcaatgattccagtgggtccaattccggataatgttacctatttcacatggattttactatttgccttctaattaatatttttcttctaaaggacaaaagtactcagagtgcagtgcagatttaggggattccagccctatttcttggaatcctggcaccatctcctgcttctgagatactttgcctgctagcttgctctgaagacctgaaattggctctatcggtaagtaattagtggtggaggtgcctgttggtcttgtgctggggacacaatggtggctaaaacagccccgggtcctgtcctcctggagctgccagtccaataggagagacagacaggttcccaaacagtgttggcccagaggggtcagggctgggacaggcagaggggtaggagggcaatgggggaagcaccggcagaaatgggactggggagccccaggcagggggctcagggccaggataggggaggcccaggcagagaggtgggagggggatggaggagacactggcaggcagggcagggcagggatagcgaagcccttgaggacttttcccaatattccccatttcctcaactccctctgaaccttcctgtgaccttcttgctctaaggaggactctgccctgaagacctccctttccaagcggggctgttttctccttctcggccttcatgtccactggatctgtagatgggagaagagcgtccttgctcctcactggcacttctaaaccattgtctctgcctcctccctgaaccctaggtctgaagcttacacagtcacactgtagcacctgctcccctttgtgctgctagacccattgactcccaagtcacctctgctcacctcgtcatttagcttcaggctcactgtcacccacaccactcctgtcattattcttggtgattttcaaattcaggtaaatgatccttttaccactctggcctcttggtgccttgacctcctctcccccactgcacttgtcctccacccaacccttctttcccatgatcacacctagaccttgtgctgggaacacacaacaacacataactgtgacagccccagaggtcccagcctggtgggggagaaggacccattctagatggcaacagccgcataaccacagcccctacagaatctcagctccatgcatctcacgctctgcccgtcacctcctgtctctccagctcactccttctaaagattgcaccagtgagccttcagccctaaccatccattaagctgtctgacttgttgctatccctcccccaatcatggccacaccactctcaactacctagccagattccccaccatcattattaccacacctttgcatacctccaaactatgaactgaattcaaccctccatttattctgcacctgcacccctggcagctgaatgtggatggagaaaaatacagaatcaccctggctggtctcggttttgattcatgactacaaacccaaatgcttaatgctgaccagcaatcctatcacttgcccccagtctattcattctccattttttcccaccctgttgatggtatagataacacatggccatgggctgaattgtctccccacacattcacttgttgaagttctcacccccattgttatggtatttggaagtgacagcattgggagggattagggttggaggaggtcatgagtgtaaaccctcattatgggattagtgactttattattattattattatttttgagacagagttttgctcttattgcccaggctggagtgcaatgacatgatctcgtctcacggcaacctccacctcccaggttcaagcgattctcctgcctcagcctccagagtagctggcattacaggcatgagccaccacgcccggctaattttgtatttttagtagagacggggtttctccatgttggtcaggctggtctcgaactcctgacctcaggtgatccacccaccttggcctcccaaagtgctgggattacaggtgtgagccaccgtgcccggccaggattagtgactttttaagagggagagagggagagatgcaacccaggaagagggccctcacagagaatcacatcaatcagcaccttgatcttggactttccagcctccagagctgtaagaaataaatctctgttattggaaccattcagtctatggtattttaagacagcccacacaaacaaacacacatgtattaatttttaaaactttattaaggtataatttacataccataaaattcacccattttggcttggcgcggtggctcatgcctgtaatcccaacactttgggaggccaaagcaggcggatcacgaggtcagcagtttgagaccatcctggccaacatggtgaaaccccatctctactgaaaatacaaaaattatctgggtgtgatggtgcatgtctgtagtcccagctactcagaggctgaggcagaagactcgtttgaacccgggaggcagaggttgcagtgagccaagatcatgtcactgcactccagcctggcgacagagtgagactctgtctcaaaaaaaaaaaaaaattcacccattttaattctattgttcgtttaattctggtaaatttacagttgggcacccatcaccacaatccaatttcagaaaactgccaacaccccatttcatacaaatggaatcatacaatatgtagcctttttttttttttttgacttagcataatgttccacattgttgcaaatttcttttttatggctgagtatttcattctctggaatttcactggtctgttcacctgttgatgggcttttgagttgtttccagtttgggttattatgaataatgctgccatgaacattcatgtacaaatatttgtgcagatttactctaatttttcttgggacaagccctaggagtaaaatggctgagtcatatgctgagcatgtttaccttttgaagaaatgggaacacttttttccaaagtgattgggcctattttatttcttttagtttcttttttttatttttttgagacagagtcttgctctgtcacccaggctggagtgcagcggcgtgatcatagctcactgcagccttgatatccaaggctcaagcaatcctcctgcctcagcttcccgagtagctaggactataggtgcccgccaccaggcctggctaatttttgtgttctttctagagacaggtgtctcactatgttgtccagctggtctcaaacccctgagcttaagcaatctgtctgccttggcctcccaaagtgctggaattacagacgtgcaccactgcacccagcccagacccatttttttttaagaattattttacactttctcctctttcttcaaaccttaaaactttctcctcccttcttactctttgttgttcgtcttgcttccaaggagatagaagcaatgacaagagaaccccaacatccttctatcccaatacctatcagccgccccgcacctgttaccatgtatgctggcttcccatgtgtgactgtggatgactctctgttacccatcgcagtgcctagctgtgtgcaggtttgttatataggtaaatctgcacatgtaccccttatataggtaaattgtgtgtcacgggtttgatatacagactattttgtcacccaggcaataggcatagtacctgatagatcggttttcttttcttttcttttttctttttttgagacggagtcttactctgttgcccaggctggaatgcagcggcgtgatctcggctcactgcaacctctgcctcctgggttcaagtgattctcctacctcagcctcccgagtagctaggaccacaggcacatgccaccacgcctgcctaatttttaaaatttttttgtagcaatggagactcactatgttgcccaggctggtctctaactcctggcctcagcctcccaaagtgccacattataggcatgagccaccactcccagccataacgttctgtattttgacagaggtttgggttcatttcaaaacaacaaatttattctttagatgtgtacatttcactgtgtgtgaattttacccccaaaaaggaactgtacacaaacttgagctccagttaatgctacgtgtgctgaagtatttagaaggaagcataatgatgtctgcgacttattttgaagtgtgtgtgtgtatatatatatacaaatatatgaacacatatataaatatatatacatgtataaatatacatatacatatatatatattttttttttttttgagatgaagtttcgcttttgttgcccaggcaggagtgcaatgctgagatctcagctcactgcaacctctgcctcccaggttcaagcaatcctcctgcctcagcctcctgagtagctgggattacaggcgcccgccaccacacccagctaacgtttgtatttttagtagagatggtgtttcaccatgttggccaggctggtctcgaaaacctggcctcaggtgatccgcctgcctcggcctcccaacgtgctgtgattacaggcgtgagtcaccacacctggcctgaaaagtgtattttaaaagagggatcaaaggctgcatgaagggatggatcaacggatggatacataataaaaccagtatagcaaaatgttaattacagactctacatggtgggtagatgggttgtctccatttgttttgtgctgccataatagaattcctgagaccgggtgatttataaggaagagaaatttatttctcacagttctggagacggggaagcctaagacgaaggcaccagcatctggtgttgggtgaggcccttcttgctgtgtccttacatggcggcaggcagaagggcaagcagggacgaacactgtgtcacctcatggcagaagatcagaagagagcaaatccaatcccaaggattacagcagtgttaatccactcataaggatgcggcctgagccctcaggacttaaacacctcctgttaggccccacctcccaagacggttgcactgggggttaagtttccaacacatgaattttgagggacactttcagaccataccaggagtgctgactgtatatttcttcaaactttctgcatgtttgaaaagggaggagagggccgggcatggtggctcacacctgtaatcccagccctttgggagtctgaggcgggcggatcacgaggtcaggagattgagaccatcctggctaacacggtgaaaccctgtctctactaaaaatgcagaaaattagccgggcgtggtggcatgtgcctgtagtcccagctactcaggaggctgaggcaagagaatcacttgaacccgggaggcggaggttgcagtgagcagagatcatgcctataatcccagttactcaggaggctgaggcagaagaatcgcttgaacccgggagacggaggttgcagtgagccaacattgcgccactacactccagcctgggcaacagagcgagactccatctcaaaaaaaaaaaaaaaagaaagaaaagaaaagaaaagggaagagagggatttaaatagatgcaacacagagaacttttagggcattgaagccattctggatgtcactctaataaagcatgcatatcatgacacagaacatgcaccaccaagagtgaaccctaatgtaagctatggactttgggtgatgaagactgtcaatgtgggttcattgatgataacaaaggtgacactctggtgcttgatattgatagcaggggaggctgtacatgggtgtatagtatggggcaggagatctaggggaactctccatatgttccactcactattgttgtgaacacaaaattgctctttaaaaaagtctattttaaaaattggccaggtgtgacagctcatgcctgtaatcccagcactttgggaggccaggagaggaggattgcttaagcccaggagtccaagaccagcctgggcaacatagcaagacaggaataatctccctgtctctacaaaaatacaaaaattagctggcattgtagcacacacctgtagtcccagcaactcgggaggctgaggtgggaggattgattgagcctaggaagttgaggctgcagtgagccgagatggcaccacagcactccagactgggcaacagagtgagatcatgtctcaaaaatataaataaataaaaatttttaaaataaaaatttaccttcaaggccagggatggtgactcctacctgtaatcccagcactttggatgaccaatgaccaaggcgggaggattgcttgagctcaggagtttgaggctgcagtgacctgtgatagcaccactgcactccagcctggacaacagaatgagaccttgtcttaggaaaaaaacaatacattaaaatccactggaaaacaacatgaacaacttctcttggcttcacattctcctctagccatcacctccatctctctgggttctttttttttttttttttttttgagacagagtctcactctgttgcccaggctggagtgcagtagcacgatcttggctcactgcaacctccacctcccggattcaagcaattctcctgcctcagcctcctgagtagctaggattacaggcgcccgccaccacacaccacacccgactaatttttgtatttttagttgagatggggtttcaccatgttggccaggctggtctcgaagtcctggccttaggcgatccacccgccttggcctcccaaagtgctgggattacaggcatgagccccccgacctggcctctctgggttctctataactaaactccttgaaagaattttctgtacttactgtcctcacttctcctcatcttttctcttggacccattccagtcaggctttcctctccatcactccaccaaaatagcttttctcaaggtcaccaaggtcctccatattgctaaagctggtgatcaatttcctatcctcatcttctttgaccatcagtggcatttgacactgcctcctgcttaatatgctttttccacttagctttcaggactgccaccttttcctagagccctcccacctcactagccaccctctctatttcttcactagctcccctcatcttcccggtcttgtttccttagggtgccccagggctcatgcttcagcctccttctcttttctatccatgctgctcctctgatgatccaaccattcttttcattgtattaaaaactggcaactcccacatttatctctcaagcctaaacttcttccttgaactccagactcacatgtccaactgcctaattgacatttctactctgatgtagacatgcattaacaaatgcatgtaggccgggtgcggtggctcatgcctgtaatcccagcactttgggaggccgaggcgggtggatcccctgagatcaggagttcgagaccaggctgaccagcatggtgaaaacccatctctacaaaaatacaaaaattagccagacacgatggcgggtgcctgtaatcccagctactcagaaggctgaggcgggagaatcacttgaacctgggaggcaaaggttgcagtgagccaagatcacgccattgcactccagcctaggcgacagagcaagactccatctcaaaaaaacaaaacaaaacaaaaaacaaatgcatgtaatttgcatgcacttggtggtttaaaccacaaatttgctgtcttaaaccaacagaaatttattctctcaaagttgtggaagcaagaagtccaaagtcaaggtcaaggcagcgaggccctgcctcactgccttcaaaagctcgatgggaaaatccatttctttccttttccacctcttagggactgctgacattccttggtttgtggcggcatcactgcaatctctgtctccatcttcactttgccttctctgtgcttgcttccctcttacaaggatacgcgaaattggccaggcacgtggctcacgcctgtaatcccagcattttgggaggccaaggcgggtggatcacctaaagtgatcccagctactcggaaggctgaggcaggagaattgcttgaacctgggaggtggaggttgcagtgagccgagatcgcaccattgcactccagcctgggtgacaagagctaaactccatctccaaaaaaaaaaaaaaagaaaaaagaaaaaggatacaagtaattacatttagggctcacccagataatccaatccaggataatctccctgtctcaagagccttagcttaatcacacctgcaaagaccacctacccacataaggcaatatttgcaggttcaagagattaggatctgatatctttgcgggggtgggggcatttttcaacctaccacaaaacatctcaaacttaatagtaggtgctcaaacacatttatttattcattgatttattttattttttattttgtagagatgttttccgggctggtctcaaactcccggactcaagggatcctcccacctcatcctcccaaagtgctgggattatggtgtgggccatcgtgcctggcaaaaacacatgtattgaatgaatgaaggaatgtccacagcagggtcataagagctagcattgagtacacctgtcagcgaaaactcaaattagaaccaagtgtgcaaaactttgcggaggctgttatgactaggaccttgatgacttgatgaattttctttttaacttatgtaacaaaattttaaacttttcacaaaaagtagagaatatgagaagtccccatttattcgccacctggcctcaacaactattaacatgtaaaacagccttgttttatctattgcccctccatctttttatttttttctggagtattttagagcaaacctcgataatatgccatttcacttccaggtacttaagtatgcatctcttaagaaaaagaagagaacattttcttccattatcacacctaacaaaattaacaagaagtcctttttataatctagtagccagtctatatccatattccctcaatggtttaaagtatgtgatttaggctgggcacggtggcttacacctgtaatcccagtactttgggaggctgaggggggaatggatcacctgaggtcaggagttcgagaccagccgggctaacgtggttaaatcccatctctactaaaaatacaaaaataagctgggcatggtggtgggcatctgtaatcccagctactcgggaggctgaggcagcagaatcacttgaacctgggaggcagaggttgcagtgagccaagatcgcactattgcactccagcctgtgcgaaaagagcaaacttccatctcaaaaaaaaaaaaaaagaaaaaatgatttaaacagtactgctggctaggcatggtggctctcatgcctataatcccagcactttgggaggccaaggcagatagatcacttgagatcaggagttcgagaccaggctggccaacatggtgaaaccccatctctactaaaaatacaaaaattagccaggtgtggtggcgcacacctatagtccctgctactctggaggttggcgcatgagaatcactttaacccgggaggcagaggttgcagtgagccgagatcacaccattgcactctagcctgggcgacagagtgagactccatctcaaaaattaaaaaataaataaaaaattactgcttgtttaaatcaggatcaaaacaaagtcccttcatttggtgtgtgttctctctcttgcacgcacacatacatataagctttttagccaagagtcttcagagattataatttatttatttgttacatagagacagggtctcactatgttgcctaggctggtcttgaactcctggcctcaagcaatgcaacctggcttcccaaagcactgggaatacagacaggcatgagaaatgccaggctataatttatttactttagatcttatttggggggagtacaacatgctaagagaaaagtacatgtaactatggttttatgaagtatcacaaagggaagaaaccacataaccgccactcaggtcaataaagagaacatgaccagtacccccaaattccccttttggctctactcttaggggtcttttcatgtgtacactgttctaaccttgcttccttcactccataatatattatgaagatcacccccagaacagcttatagagatctttcttatatttcatttatctggatagtagtctggtgtgtagatgaaacgtcgtttagtcaaccagtctaccaatagaaaattgacttagttgtttccagtcttttttccttacaaagagtgttgcagtgagcaacctgggctcgttgccggtggaaggtgtccaggttctgggcgttttgaacaaagaactggacaaaacgcaccaacgaaacaaccaacaaaagaatgaagcaaagaaagcatacatttattgaaatgaaaagtacactccacagggtgggagcaggctgaacagacacactccacagaccaggaagcaaccaatcagaggctgaagtgaaggtacaaagttacaccctatgcaaacgtctgatgggtcgcgggaggggaccaatcagaggctgaagtgaagttacagagttacacccctatgcaaatgaagactaggcccatgaccagtctgattggttgtgggagactaccaatcagaggcactttccatctttcatcggccacgcggggaggggaggggaggggaagcccgccggggtcgggggttgcgaagggagtagcctctgatccttttgttacttgggtgtggaaagttgggattttccttttgattccgttctaggaagtcagtgcaaatcagccttaggtttcctgcctctagactattctcctgcctcagcttacatccttttattgccaatgtatctttaagttggattcctagcagtgagatcagatcaaaagataaatgcagccgagcgggggggactgctcacgcctgtaatcccggcactttgggaggctgaggcgggtggatcacttgaggtcagaagttcaagaccagcctggccaacatggtgaaaccccgtctctactaaaaatacaaaattagctgggcatggtggcgcatgtctgtaatcccaggtacttgggaggctgaggcaggagaatcgcttgaacccgggaggtggaggttgcagtgagtcgagatcccgctaccacactccagcctggctaacaaaatggactccatctcaaaaaaaaaaaaatttttttttaaatgcacctgcaatcttgttagacactgccaaatgtcccttacaccttggacttacacgttgtgcattcccactggtaacacagaagagtgttctttttctcatagtcttgtcaataaattatattgtctaatttttgtgactttgctaatgggtgagaagtagtatcgcagggtagtttaatttgcatttctctttatatgagcagaattggacatttcttaggttttgtttgtttgttttttgttgttgagacagagtcttgctctgttgcccaggctggaatgcagtggcacgatcttggctcactgcaacctctgtctccccgactcaagcaattctcctgcctcagcctcccgagtagctgagattacaggcgtgtgccagcaagcttggctaatttttgtattttcaccatgttgggcaggctggtctcgaactcgtgacctcaggtaatccgcccacctcagccttccaaagcgctgggattacaggcatgagtcacagtgcccagccacctccttaggttttaaggcaatttgtatttccttttctatgaactattccaatcgtttgcatatttttctactgaaatgttgctttttattctttatttttaggacctcttaattctttctctcgaagggaaattgatccccagcaatggttgacagcaaaattaaatagaaagcactggctatggtagaggacacatctggattcaaatctggcctccattatttacaaaccgtttgcccttgggcaagttatttaacttcactgagcctatttctttgtctattcccgtttcacagagtaattatgaagttcagaaatactgtacacaaagaacatgacacattgtatgcattcaacatgtttagattcctcccaattgcctgtttatatcctcaacccatgtttttcttttcttttttcttttttttttttttttttgagacagagtcttgctctgctgcccaggctggagtgcagtggtgtgatcttggctcactgcaacctctgcctcccgaagttcaagggattctcctgcctcagcctccagagtagctggaattacaggcacataccaccacgcccagctaatttttgtattttttagtagaaatgggggtgtcaccatgctggcaaggctggtctcgaactcctgacctcaggtaatctgcctgcctcggccacccaaagtgctgggattacaggtgtgagccaccgcacctggccaacccagttttttctaactgggttcttgtctttcttattgaaggatctctttgcatattgtggatattaatcctttgttaggtttgttgcaaagctttcctgcaagtttgtttttacttatttattcattcatcagtaggtgtactgagcacctactatgtgacagagactgtgctaggagctgcaaataaagtagtgaaagaagcagatactgtctctgcccttaagttatttctaattggagagaaaatcaaacaaaattaattataaagtgtgacaaaggctaagaaggaatttagcaaaagggtgggacagaaggggatccacttttggtggggtggtcatgaaaggcctaagttattaacattgaagatgacattgaaggatgagaaaaagccagtcatgtcatgaatggagggacaagcatattataaaggactgaagtggcaaaatgtggcacattcaataaattgaaagatcacattcccaaatcataattggcagggagaatagtgataggagatgagtcaagaggttggcaggggcctcacaggacaaggtgaagaaatttgactttattataaatgtatataattattatatatattatataatatatatatttatgtatataattattatatattatataatatatatttatgtatataattattatatattatataatatatatttatgtatataattattatatattatataatatatatttatgtatataatcattattattatttttttaaaggacaggatcttgctctgtcacccaagctggaatgcatggcacaatcatagctcactgtaacctcaaactcctgggcttaagcaatcctcccacctcagcctcctcagtagctgggactacaggcctgcaccaccacgcttggctaatttttaaattttttgtagagacaaggtcttgttatgttgcccggctggtcttgaactcctggccccaagtgacctgtttctattttaaggaagattctcatggcagctgtgacaatggattacagaagagaaagagcggacagtaggctaccatgttgttgacagaagttaggataatggcttgtaccagatggtgacagtgggcataataagaaaggtagatttcaggtatgttttttgttttttttgtcgagatagaatcttgctctgttgcccaggctggagtgcagtggcacaatcttggctcactgcaacctccgcctcccaggctcaagcaattctcctgcctcggcctcctaactgtgattacaggcacccgtcaccatgcccggctaatttttgtatttttagtagagacagggtttcaccatgttggccaggctggtctcgaactcctgacctcatgatctgaccacctgagcttcccaaaatgctgggattacaggcgtgagccaccatggggccttgggtatgttttgaaacagttcaacatgatttgttaaggaactgagtggaggacaaaggagaggaagaaataaaaaataattcccctggccgggcacggtgcctcacgcctgtaatcccagcactttgggaggccgaggcgggtggatcacaaggtcaagagatcaagaccatcctggccaacatggtgaaaccccgtctctattaaaagtacaaaaattagctgggcgtagtggcgcacgcctgtaatcccagctacttgggaggctgaggcaggagaatcgcttgaacccgggaggcagaggttgcagtgagccaggattgtgctgctgcactccagcctggtgacagagcgagactccatctcaaaaataataacaataataataataataataataattcccctattttcttgctgctgaacttactgggtggtaattgtgctatttaaggaggtagggaagaccctcatgggaaggggacagatttgaaaggaaacaaagacttcagtgttttacttgttggttgcattaacacattaaatcttcactccagctctataagtactatcattaactctactttaaagatgagaaaactaatccagagagaaattaagtaacttgctagggttataaatgataaagccagaatctattgatctttctccattttccactccttccctccatccaatcatttatcttctctttttattgagacagggtctcactctgttgaccaggctgaagtgcagtggaatgatcatggctcactgcagcctcgacctctcaggctccagtcatcctcccaccttagcctcccaagtagctgggaatacaggcaagtgccaccacgcccagctaatttttatattttttgtagtgatggggtctcactatgttgcccaggctgatctcaaacccctaggctcaagcaatcctcttgccccagcctcccaaagtgctgggattacaagcgtgagccaccgtgcctggccatttatcttctcatccatccactcttctaatcacctattgcctcatcttcctagttccccacacaccattttctcaattcacccatccatctcttcatccatccatgcaatcatccatccatcctcccagcccccaataaatattcatcacgtgccagattccccaggcacctgatacctgctgtgcaggaggaaagtcagggatgagaaggcatgagacagacacaatgacatgcagcttagcttaagatatttattcaatgctctcacatttggcctctgtgacccagaaaagcggtagagcagggtaggagcacatgatgcatccttcagccactgcaacctccagagggaccaggtcttcttcaggaaatcttcgttcctggtggatgactgatcagccataactgcaagacacagacatttagcacctccgcttgcagactaaacacccaccctgactgccctcatcccatgaggatccaggtgcctttgccccaagaagcctggtttccatactacatccctcaccatggggagaagtcctgcgctctccatttctccatcgctggcttctcctgggagtcatgccaatcattggtctggtccccgtcaaagtttccacaggccccacacagtttcccagcatggtcattgctgacaatcacagccaccttcccattggctccaagccacacctggacccctgccttctggcggactagcagggagccatcaggtgtacgactcacggacacagatgctaacttctcagctgggagatccactcggagaccattcacctggtgggggatgcccagcaaacacagaggtgaggccacagccccagaatagctgggtgttaccaggatggaggatggagaccccaaacaagataagttcatggagctaaatcaaagaggcaggtgctgaaagagatgaagacctggatgtttgcactatttggagcaatggatacatgagaagatagctagagatctggatagacggataaaaggatggagagtggagggatggagagacgtacccatggatctacacaacaccccaaagtcggtgggggaagcattttgtaccagacagataagcaaacagacagacaaacaatcaaaccccagggtcatccttatggttctagttttctttttcttttcttttttttttttttaagatagggttttgctttgtcatcccagctggagtgcagtggtgcaatcacagctcactgcagccctgacctcctagactcaatcaatcctcccacctcagccttctgagtagctgagactacaggactacagatgtgtgccaccacaccaggctaatttttgtatttttttctaaagatagggtctcactgtgttgtctaggctggtcttgaactcctggattcaggtgatctgcctccctcagcctggttctagtttgcaaaataaaacaaactttgagcacatcctgtaagttattggttccctaaccaaaacaacgttatcctttatttttgcaatgctgatgtctgaagataagtaatgactttagcaaatataataatcatgtgagaaaattactttttcttcatcataggctgcagatccagtaactttgtgagtttttcctttacataactgttgtctatgttagttggtgaattaacccttctaaagttagattccctagagaaacttccttaaaagacttgtcttttttttttttttttttgtaaatccttcttttgtttgtttgttttttgttgttgttgttgttgttttgttttttggttttggttttagttttttttttgagatagagtcttgctctgtcgcccaggctggagtgcaatagcgcgatctcagttcactgcaacctccgcctcccgggtccaagtgattctcctgccttagctgggactacaggcatgtgccaccatgctcggctaatttttgtatttttagtagtgacagggttttgccgtgttggccaggctggtctctaactcctgacttcaagtgatctgcccgcctcggcctcccaaagcgctgggattacaggcatgagccaccatgcccagccctctaaatgcttttgtatctgagttttcctctgccagatgattggagagataggtagatagatctgaaaagacagatgggtgggtgggtgggtgggtggatggatggagggatggatgggtggatgggtggattggtgggtggatggatggatggacagatgggtgggtggatggaagaaagaaggaagggaaaaagactagaaggaaggaaataggaaaaagagaagggggtagaatagatgctggaaggaaggaggggaaaagggaggatgggtgtagtgaaggacagatgaagactagtggatggaaagtctcagtagggtgcaagctttccaagtataacgactgagtccgagtcatctctgttacccagcacatggcctggcacaaaaggagcagggctgagtttattcacaaaaccagccttttactgagtaccctctaggtgccatgccctgatctgggtactgggaacaaactggtgaccaagatggacaggatccctgcctacctgcggcttatagtccagtgatgaacaaagatgctgagcatcttctgggagtttccttctaggagtctggaattttggtaggtggataccaaaaccccaggcactgagactctatgaatttccctggcagatgacatttcatgtttcatcacaactttgttgctggaggaattaagcacatcctgtgtgactctaccgagaaaggactctcggaagcttgcacatgatttcccctggactttgtgcgatgcaccttttccctgtgtcaatttcacttcgtatcttttccctatgatacatcttagccctaagtacaactatatgctgagtcctgtgagtcctagtgaatcactgaaccaggttatgggaaaccctgacacattatgtgaccccccacccccagccttgaccaatcacggaacttcctccctaaagtcacagtgattggctccaggggtgggcatgtgacccaaactggctcagtgagatataatcctgggtcttttattgaaccattttctgttaaggtagataagctggtggggtgtaggcctgggcagctgggcgggggtcgtctttacacctgtaagtggaaagcctgtttgagaacaaagctgatttggcaaatagcaagtctcaaagacggaagtacaaatttctgataatattgccagggcacctagatccagccattcctgaggctctatcctgggattttctagctacatggactaataaattcaattttgcttaaggcagtttgaatttggttttaagtcacttgcaacccatagagtctcgattcatactaatgtcaaaactattaagttgcttgagtatgtttttgctcctctagaactcagccagaacagagggaccaagtttgaaatattgagataaatacaaatccagagactaaaccgcagagacctggataaagaaaacagatcgcaagacagaaaggaagccaggaatgtggggacactgtaatcagaagagcaaaagcccagggagacattccctaccccctactcacaaacttacccacacacccttgtttggagtcaacgtcaccatcccatcctggaagaagatgtggacctggcccacagcctccgttttgccatggcagatctggacttcggcaactacacggtaccaggggatggtattctgtagtcctgggcagcgggaagagagctcatagacaccaggagaggtggtggcaccacgggccccatcaaaggtggtgaggttggcacccacagacaggacacagagaccacgggtggcccagcagttccgggcttcagccttgacctcacatacacggcctggtgggcagccagctgcctggcatgtcaggccagagcttgaggaacaggaacagcgctcgctgcagtctgaggtcagcagggaggagtttacctgtgcacagaaaggggccaggttatggtggtgggatggatcgcaaaaatggccacactgcttgaaccctctgtatccatgcagagtgactttacagactcccattaagaaatagagtttatttccccctccctatgaatctgggttggccgtaagactatatttaggtcaatgaaacacagaagaagcaatgttgtaacaggtttaagcctagacctcaagagacctcacagcttctctttccttctctctctctcacatacacagaatcctgcccagccaccatgagaacaagcctgggctagctccctagaagatgagtgaccccatggaacatagataactcttccagctcaggccaccctagaccaggcagccttcagctgacccaccagctgactacagatattatacatgagtaagcccagaggatagcagaagaaccacccagccaagtccagcctaaactgcagtcacaaaattgcaaactaaatgaataattgttttaagccacaacgttttggagtgatctgtaacccagcaaaagctaactgatacaggtaagaaatgaagaaatgtaattaacaaaataaatgccatctctacaatgatgatttccacatctctaggccagacctctcccatgaaggccagactcacaaatccaagacttcgggcataggcagaggggtcagggcagagatggggaagcatagggagctgaggggttcagaggaggcacctaacccagcctaggggatcaaggatggcttccagtaggcagtgagacctcaaggaaagagcaaaatttggctccatttgcaagcaatgcaagttagtgctgcatgttaatggctagcctcgggctgacttctctatgtcacaatttcttcatctgtaaaatggggaaaatagtcatagtatctattgcataggattgttgtgattattaaatgaattaacatccagaacatggccgggagaggtggctcatccctgtaatcccagcactttaggaggccaaggcaggaggattgcttgagcccaggagtttgagaccagcctggacaacatagcgagatcccatttctacataaaaattaaatagtcagccagggatggcagtgtgagcctgtggtcccagctactcaggaagctgagacagaaagatcgcttgagcccaggagtttgaggctgtagtaagccgtgatcatgccaccgcactcctgcctgaaagacagagtgcaatcctatctcaataaataaataaataaataataacacccataacaaacatggtgcatagtaagagctcaaaaaaattattaacaagaataaatcaattcttcaatttaattcatattattaaacaattattagctgggctacctatttgcactgttgtaaactgctatttctttttttttctttttgacatggagtctcggtctgttgctcatgctacagtgctgtggcacaatctcggctcgctgcaacttccacttcccgggttcacgggattctccttcctcagcctcccgagtagctaggactacaggtgtccaccaccacacccagctaatttttgtatttttagtagagacggggtttcaccatattggccaggctggtctcgaactcctgaccttttgatccgcccgccttggcctcctaaagtgctgggattacaggtgtgagccactgcgccccgctgtaaactgctctttctttttactgagtgtgatgaacatgcagggcaaggcccagtgctcagtgggtatctttcctgtataatcgggcctgatcctcagatacctatggtacaaagatggtgattagtcccattttacaggtgaagaaaatgcagttcaaggaggggccaaatgatgcccccgccccaagatatcaggtcctaatccctgtaatgagtaaatgtcaccttatatgggaaaagtgtgtttgcagatgtgattgaattaaggatctgaagatggaaaatttctcctggattatctgagtgagccttagatgcaatcacgtgtatccttataagagagaagcagagggaggtgttatgacacactcagaagaggaggcagaggttggtgtgatgtggccacaaccaaggaaaacctgcagcaaccagcaactggaagaggcaacaaacagattttcccctagatttcttttttcttttcttttcttttcttttttttttttttttgacatggagtctcggtctgtcacccaggctggagtgtagtggcgcaatctcggctcactgccacctccgcctcctgggttcaagtgattctcctgcctcagcctcctgagtagctgggattacatgcacgcaccaccatgcccggctaatttttgtatttttagtagagacagggtttcaccatgttggtcaggctggtcttgaacttctgacctcgtgatccgcccgcctcagtctcccaaagtgctgggattacaggtgtgagccaccgtgcctggctcttttccttttttctttagaggtaaggtcttgctctgtcacccaggctggagtgcggcagcgtgatcatagctcactgcagcctccaactcctggggtcacgccattgtcccacctcagcctcttgagtagctgggactataggtgtgcaccaccatgcccagctaattaaaaaaacaattgtatgttgcccaagctggttttgaattcctgggctcaagtgatcctcccgccttggcctcccaaagggctgggactgcaagtatgagccactgggcatggcctcccctagatttctctggagggagtgccaccttgccaacaccttgatgtcagcccagtattcctgatttctgacttttggccttcagaactgtgggagaatgaatttctcctgtttaagctaccatgtctgcggtaattggttacagaagctgcaggagactaatagggggaggttgcctgcatcaagtcacatagctgggatatggcggtacctcctctgtccccagccttgaagaggtcagcacagaatctctgggtctctctcaagctcttctaccctctctgcccaccccaagcccctactcaccggcaagtatcggccattatgggtgcagccacaatcttggacagggatgcagacaccctgggaaagcaggaagcggtcgtcgcactcacagccctcaaaacagcgggtggtgcagcccgtgaggccggagagagccgcacaggatccctggcaggtgcgagtgcagatggagtagtggctgtgggcggggcaatggagcgctgcagagagaggaggcagggctgagtcacacctccaaagggtcctggataaccaagggggcctactgcacacccagccctgttttaggcggtgctgaggacacaaatactgagaaaagtctcaaccccagtcctacagagctcacttccagtgggacagacaggaagagcccaaagtgaacatgctgcatcagggagtgtagacagagaggtcagggtcagggtggggaggcacaggcagaggggtcagggcaggcatgagggggcaaaggcagaggggtcagggccagggtagggggctacagacagaagggtcagggctgggatggggagggcacagacagagggttgagggccagggtagggggcacaggcagaggggtcaggaccagggtcgggggcacaggcaaagaggtcggggccagagtgggggcacacaggcagaggggtcagcgccaggatggggagggcacaaacagagggttgagggctggggttgggggcacaagcaaaggggtcagggctggggtgggggggcaaaggcagaggggtcagggccgggatggggagggtacacacagagggttgagggccggggtagggggcacaggcagaggggtcagggctgggtagggggcacaggcagaggggtcagggccagggtgtggggggcacaggcaaaggggtcagggctgggataggggggcacaggcagaggggtcagagttgggacaggggctatatggacccaagggaattatctgtggtaagtccctggtctctggctaagcaattggtggaggtgtggctgttctgcaatgcccaccaggtttggggaaggagcatcaggctgggggtgaaatgctgattttatttgggaacacagcaggtaagagggacggtaaggacacccaggggaaggtgtcttggacaccctaacaattaccacagactttgtagcttaaacaggggaaattcattctcccacagttctgaaggccagaagtcagaaatcaggatcactgggctgacagtcaggagagagttcagggcttgagacagacagaccaggtccatggtcaacaatgagaacaaatctaaggccgcgggtgtggatgaccgccctgggtataggtcctgcccaggggagacctggctctgacctggagccgaaggggccattgctttttcctgagagtctctggtgatgtccctcccatggggaattgaatgagaggtacagtcctagtttagcggggtgtttaatagcctgcagccttgtcttggggggatctgaggggatatggtcttgtcgggggtagaaggagggtctgtgtgagccacagatctcccaacccatccaactctccctttcaggtcactgcagaaagagtccagaatagaacactagggaagaagagaatttgaggtttgagcagagtgggcccagacaggaggctgagaaggaacagtcagagggatagcagggaagccagtggactatgccgtgggagaagaagttgtgtgggtgtggggtgggagggggtggggagggagcgcttttacagggagaaaccactccgacatgcaaatagaaggaatgggccaggaggggcccctacacctggtctagagtcctgcgagggacccacggacactcacggcagaagctgtctgtcctccagggcttcacggccacgccagctgcctgacaggccgccgtgtaggctgccaggctgcggcacaggaaggctttgtcacccttttgcgcgcacaggtcgtatacgcattggcggaagtactcagagggactcagcaccgcctggcaggtcgcgaaggggccctgggggttccggagctgcccgcaggcctcgttgctctcatagggtgcagtctcctctgccaagcacactgggcagccttggggcccgcagccctcgccacagcccttggaggagccgggcgcccgccatgcagccccgaaggtctccacactggacgctgctgagccattgggcaggacaaagtcgtcactccagttgccattgaagttcccacagaggccacagagccgtccacggaaggggctggggatggacatgaggaggtgggcatcgccatcaaagagaagccgcagccccttggtcgtctgcagaaccatgtttcggccctcggcggtcacccgcacgcggcccacagccacaggcagggccacagcctcgccgtccacggtgacctgggtggaagggtcgggtaggtcaggaactcacagaaccacaggcaaggctgtcctgtcccactcccaggccagagctgcatctccctcagtcccattaacgtcaggtcatgtttcccttaaacttcttgggccccaggcctggcgtggtgactcacacctataatcccagcactttgggaggcccagacaggtggatcacttgagcccaggagttcgagaccagcctggccgtgacagcaagacctcatctctaccaaaaataaaaaattagctaggcatggggggctgaggtgggaggattgcttgagcccagcaggttgagcctgcagtgagctgtgatcacgccaatatactccagcctgggtgacagaacaagaccctgtcacaaaacaacacaaaaatctcccacggtgggaccattcaccaaaccttccagggtaggtaccagagttcccatgttagaggaatgtccctctcatacctacagggtggggtcgtgtctccctcagaaccccctagatggggctgtgttgccttcagacccccagggcaggctcacatggactcacctgctgcccctgagctaggctcacaacctggccagccacagtaaccaggaggcgttggagatctccagctgcattcttctcaagcacgatggaaaagtcctcgtccccaggctttgggtggcagacttgggccaagacataggagcaggagccatgcaggtcgtagacacggccatcaagggtgatgtagtggatgcccccgttggccaggcagcggccacagcctgtggcatgacaggcctggacaccatcctctaaccggcactcctcatggggcccacaggctgcgccctcctggcaggtgacatggccacctggcccacactcacagcgccgctcacactcagggcccgggtagaagacctcgcccagtgggtagtagcggccatcatggaggcagccacactggcccacgggtacgcaggtgtcaccactgagtacgaagccagcatcgcagacacagccttcacggcaggccgactcacagccctcgggtgctgagaggctcgggcagctcacagggcaggagtcaccgcagagctcatagtggctgtgggcagggcactgcaaggctgtggggacaaggtgggcatgagccaggtaggtgttcgagtcggggtcttgggaggccctgagtgggaaaactgctcaggccaacttgagtgtctctgtgtatgcacatgtgatccaggacatctaactgggggactcagtgtgggacctggaatgggaggggacatgccctggtctctctgaccaggttatgtgttagcctgaccaaatatttctgaagatcaaatgactctgcttgcctgatttttatttatttatttatttatttattttttatttttttgagacagggtctcactctatctcacccaggctggagtgcagaggcgcgcttactgcagcctccacctcctgggctcaagcgatcatcctgcctcagccccccgagtatctgggactacaggtatgagccaccacatctggctaatttattagtagttttctgtagagatggggtctcactatgtaagccaggcttacctgggtgaaatggatcacttatatctattcggggtatgcaagatcagaactgactatgggtacctcagcgtgtgaatgtgactggggtgtggggccacatgtatctcagggtatggctctgcctgagggcacccagctgtgggtgtctgacatgcagcatctcccagagtccttctgacatggtctgcctaagggtgtgcctgggtgaagttggcaggatacctgtgaccaggagacctgcctgaagggaaccgcctaggactatctaaccatgcatctgtgtggatctgcccagggctatgtaagagtcctgattctatctgagtgtatctaaccagttagtctcagtacaaaatctgagcagataccactgaaggtatgtgacttattctatgtgactaggtgtatttcagtgtgtgcaacagaccaagggcctctgaccagctgtaactcactaggtcttcctaaccaggggtaccttgctgtgtgactgaggcagagtcagccatcccaatctacatgccttggatatctgagagcatggatcaccaatcctcaacagtgtcctggaccccaggtttctgactaggtgtttcttttctttctttctttttttttttttgagatggtgtctcactctgttgcccaggctggaatgcagtgtcacatcatggctcactgcaacctctgcctcctgggttcaagtgcctcagcctcctgattagctgggattacaggtgcccaccaccacgcccagataaatcttgtatttttagtagggacagggatttcaccatgttggccgggctagtctcaacttcctgacctcaggtgatccacctgcctcggcctcccaaagtgctgggattacaggcgtgagccaccacgcccacactctgactaggtgtttctaactctctctcactgcagtacctttcttggggcatttcagtgtgtgagtgccaaggtgtttggtgacaggagataccaagctcagaggaaggaaagtggcccctgagccccatggaggaggaaggggctgctgtcctacagtcctgggaagggcagggagagacccaaccatgtggaccatgcatggagcagtactcacgacagaagtccggccgcctccactcgccgagctgggccccagcggcctgacaggctgccacgtaggtagccactgcaggacagaggcctccaggatggccctgaacttggcaggcgtccagcaagcagccctggaagtactgcgcgggcggcacaaggccgtggcagggtgccagcgggccgtcggtggcggagatcacgccgcaggcgtccgggccgccgaaggactcctgctgctctggggtgcacggcgacgggcatggcttggacacacattccccgcagccctgggccccgcccacctgccatccagcgggcttcccgcccacagccttgaggtcgtctgcggggtcctggttgtagttcccgcataagccacagagagaggccgcgtacgccgccggcacgcgcaggcgcacgaagctgtccccatcgaaagccagcgagagccctgaggttgtggtcaccaccacgtcggcgccgctcaggtgtgcgtgcaggagcgagtccagctggaaaggcagagccacgaacacgccgtcgacctgcgggcgggggatggcggcggggggatggggcgcggtgagtggagagaacacgggtttgaatcctggccccaccacctactagctgtgggacccagagcatgtcacctcccctctgaaaataataatgagcatctataggccgggcctggtggcaaagcctgcaatcccagtactttggaaggacgagatgggaggatcacttgaggtcagaagttcagacccgcctgggcaacatagtgagacccccatctctacaaaaaaaatgaaaaattagccagcatggtggcctgcgcctttagtcccagccacttgggaggcggaggccaaggcgggaggatggattgagcccagcagttccaggctacagtgagccctaatcctgtcactgcactccagcctgggcaacagagtcaggctaagaaaagaaagaaagaaagaaaaacagaaaagaaaaaacaaagagcctctataggctcatgtcactgactcctcatccttctcaaaaacaggtactttcttagaccagtttacagaggaatacactaggctcagagaggaagaagccgctgtgccaagccaccaggctcctaggcgtacactctgacccttccatcatgccccagctaagctgtgaaaggggcccaggggaatggtgaagcccttaccatctcaggcaaccccagagctggcacttgctcctgtctggcccacagccctcctcacctgtagcttccggggccagcgggcactcagtgtcaggctgtggttgtagatttgcagggtgacactgcgggtgtagctgacagcctggctgccccggtgctcattggctacagtgacagtgaagttctcagcccccaagggtggtccgtggcagggtgcactcagcaggtactcgcaggtgccttggaaatcgaatcggtgcccatccagagtgacgtaatgggggtcaccccacgcctggcactcagctgtgctgacgggctggcagccgtgctggccggatggcaggaggccacacacttcacccagcccacagctggcaggtgtgcagaccagcgagccacccccaggcccgcagcgacaccactgggagcaggtgccatcagcccaaaactcactgcccgcctcgtggtaggtgccattggcccagcagccgcagccgttgttgaggggaacacagcggtcagcacttaacacgaaacccgcgtcgcactggcagccctccacacaggggccctcacatacggctggcgtcgtaaggggtgcaggggacggacagctggctgggcagggtgggccacagacctcatagtggctgttttctgggcaggtgatctctgtgggcagacgaaggagcaggaaggagagaaatagagagaagggtgtcaggggtggggtcccaggacagggtgggaggagacagagatactagggagcagacagaaaaagggagagacagaaaacaagacacagagaggacacagagaaagaaatgggagagggcgagacaccaggagacccaagcagaaactgagggagctagagaatgagaaacagacagatagacacaagcaaagcgaggcccagagatgagcaccaagagacagagagacaaacagagaaaaaagaaaacaaagagacccagaaggaccagagtgaaaccaaaccagccccgaagagacgggaccccgccccccgccccacctctgctcccccaacactcaccacagccaacctgtgcccgccagtcttcgatgacaaccccagcggcctggcaggcggccacgtaggaagccagagccttgcaaagaatgtcacggtccccaccacccatgcagacgtccagaacacagcccttgaagaagctctcaggtggcacatgagcatggcaggtggtgaaggggccccctgtgccagatgaaaggggtccgcagaagccagggccctcgtactgctccaaccggtcctcagggcacgttgggcaggacccccgacattcgtcccaacacagtgggtcccagcctggggctcgccagctgccgccccagatgggtatggagggagccagtgtgccattagggaagacctggtcattgttggggttgcggtccatgttaccgcagagcccgcacactgcgccatgatagctgctggggagcgtcacgtctacccgccagttccagtcatagctgacttgcagtccaaagtcagccaccagcagtgccttcgatgcaccctgggccactgaaatccgcccgtcggccacggagacaggcaaggctgtgagcacaccgttcacctgggggaaggagggaaggcaaacgggtcactggaggttttacggccccagctctggccctctgcctccctctctctcatcccaccgggggctgggagaggccagggccttcccccgagagttggattgtcatctgacacactgtggacagttgttctagcccaggtcttggggaacgaaacctcactttactttttctagatcttctcccttcatctctatctccctcttctgtctctctgtctctctgtctttctgtgtctctctccctctgtcttcacctaagtctatatcacttggtcttctctctctctctttctgtctctctgtctatctctccctcctcttcccttcctccctcctaccctcattctctgtgtgtctcttccactcactcaccatcatttatccagtgcctactctgttccatccctcattttctctctgtgagctaccattaagctctatctccatttccctgggcagaaaggatagcccatctgtctcctctgatctccctacatatctccctatatttctttctttctttctttttttttttttttttttttgagacagatcctcactctgtcacccaggctgcagtacagtgtcgaaatcttggctcttgtaacctccacctcccaggttcaagtgattctcctgcctcagtttccagagtagctgggattacagtagcaccaccacacccagctaatttttgtatttttagtagagatgggggtttcaccatatcggcgaggctggtctcgaactactaacctcaggtgatccacccgcctcggcctcccagagtgctgggattacaggcgtgagccaccgcacctagcccgatctccctgtatttctctctgtgtcctggtctctgggtctctcacttgttccctcacaaacactcaaacgactgttcacctggactagactctgagctcagcatgtgacatgcacggccttgctgtgggggaggccctgatacgatgcccacttcacagatgaggaaactgaggcctaccaagtgaactgcccagcatcacatagctcataaggaggagaggctggattgaaacccaggtctataaaaaaggcaaatgctgaggtcctatgttaaagccctttgccaggggctaggctcatttaattcccagtaacagggtgacatttttgctgcaattattctttttgttgacagtttgtttcaggcccaggtgaagacaaagagccttgagctgctaactgtggtcgtcaggatccctcctgccctcccggggacctcaggggaccatcctgccacacatacccggactttgccgatctcgtccttgtggatggagatgttggtgccgagggcagccacggtgacgactctcacgtaggacacagcagggttgccccggttctggttcttggtggtgacggtgaagggtgtcaggccctgggtgctgacccccgggcagccagttgttgccagcacatagttacaggtgccctggaagtcaaacttccggccatcgaaggagtggtagtgtgggtcgccccacagccagcacgtggcctcatagttgggcaggcacacgccctggccaccctgctccttgcatgtctcctgtggccggcatgtcacgccgtggcacgggtctggggacagaagagggaggaggaccttgaggggctgcccattgtaaagcatggccgctccctccatatctacccagtctgtgccagggatctgagggttactgcaggcaagaccacattccagagtcctcatgtctaggacccacttcctatagtttgcttttatattttcttttgttttgttgtttttttgagatggagtctttctctgtcacccaggctggagagcaatggtacaatctcggctcactgcaacctctgcctcctgggctccagtgattctcctgactcagcctcctgagtggctgggattataggtgcccaccagcatgcttggctgatttttgtatttttagtagagacagggtttcaccatgttggccaggctggtctcgggctcctgacatcaagtgatcagccaaccttggcctcccagagtgttgggattacaggcatgagccatcatgcccagcctgctattttcaagaccagcccctgggagtcgcacacagctgacactgaggccccatgggggactgtgtctaagtctcggctgtcaaaggtcccataccggagacctgggccccagaggtctgtacagccaagacccagtacctagagttcccctacctctgagactgaggccctgccatttgctgtgtgagactgagatcctggagtccacgcacctaagaccaaggcaaagaccaaggctctgggtctgtgtttaaggtgcactttccatggtgcccttgcttgagatttcaccctgttcttgtattttaagttttataggaacctcaccgtcttcacttacataggctacggctgctttcacaccacagtggcagagtgagtagttgtgatccagaaggtatagcctgcaagcttaaacacttaccatctagccctttagagaaaaggtgcacttgaccccagttgagatctgtgccccaggggtccttgtgtctgcgatgccagccctgagagcatccatgtctgagatcccagccccagggttctctgtgttcaagacctgggccccaggccaggtgtggtggctcaggcctgtaatcccagcactttaagaggctgaggtgggaggatagcttgagccctggagtttgagactagcctgggcaacatagtaagaccccatttctacagaaagattaataaattagccaggcgtggtggtgtgtgcctgtagtcccccactactcgggaggctgaggcgggaggattgtttgagcccaggaaatcgaggctgcagtaagctacactacactctagcctgggccacagagtgagaccttagctcaaaaaaaaaaaaaagatctaggtctcagggtcccccatgcctgagacctcagccccctggacatctccacatttgatagaaattggtctccaatttctctaggtcctggaggcctctatgcccaagactagggccctggggtgatcttctggcaagagcccagtgccagggtctcagcaggatttgaaatgtttgagaccctaactagctaagtctcatgggctgggctccctcagtgcaagactccatccctgagggttgctgtattcaagacagtagccttcatcgtgtctcactgctgaggccctgtcctggggggtttctgtgtccgagaccctgttcgtacagttactacatctgtgaccccagcttgcggaacccctgtgtgggagaggccagccttcaaacgtctccttcctcctgtgtccattatcaatgtaccgcctctcagcttcaaatacacccacggagttaagctttgtcaacagagggcgccggagagtcactgcaggagggagggtctccgggtctggcttctagccagtttggtcctttcagctctggccagggtgcggggccacattcagcgagtgccactggccgcagctggcttcccagtgaggggttcccttcttgccaagtccagcctgcagaaacctctgtgccacccagtgggctacagctgcagtgagactggactcagccttggggctgattctcccctccttgaagaggagggaccaatttctcccttccatgaggcttttaacttagccctagagtggcggctacttcctgtgtgtgctttggtggtattctttagtgctctctttaccgtttcttatttctgtttatttgtttgtttgtaaagagacaaggtcttgctgtcttgcccacgctagagagcagtggtgcaatcatatagctcactgcagcctcgaaatcctggggtcaactgatcctcctacctcagcatcctaaatagctgggaccacaggcacgcatcaccacacctggctaattttcaattttttgtggagacaggggtctcgctatgttgcccaggctggtctcgaactcctggcctcaagtgatcctcccaaagttctgggtgtgtgagccacggcaccagaccctctttacccttaatagttaatctcctattaataagtaagtgattctttaattaaactttcctcattcaaatggccatacgctttctgtctctcgactagatgctgagtgatataccccccattcctgggagtccccattatcctgctcatcagccctgagagtcttagcccccactccttggtgctggagctcccattctcttatccttagggggaggagagttctctgctcttcaccctaagaaatgagccctgggggtggctgtgtcccagatttagtctgggggattcccacatcagagactatacccctagaaatcctgatcttccagttaagaggggtccccatatccaatgtcctgccttggtgaggtctccgtgcgtgagactcagaactctgctctctgtccctgcccctgggatcccaatctctcccctgccctttggtgctagtgtctgaaccccaagcccgatcccacacatcagtgttccgctcatgatggaaccctaggctgctgctcttgtattctaaagtcttataggaacctgacctcttcacttacatagtctacggctgctttcatgccacagtggcagagtgagtagctggaacgagaacctacagcctgcgagcttaaacatttaccatgtagcacattagagcaaaggcgcgcctgtccctgccttataccgagggtctctgacatccaccctgagaaaactatctctgagggtccccacagcctggattttccctaagggtccctacctcccaaagtaggtggccctggccctgtgaaacctggtctagggttccccaggtctgcaacctcaatcattagtcctgtacacctcccgccatggacaccccagttacactaccctcagccccagagtccccatcctccatccctagtcccatcagccccagtcccagcccagcccagcccagcacctttggtgacgcagctcaggatgcctccggagggctggcacacctgccccggcttgcagctgtgttcctggcacaccacgactttacccacatggcacgtgcactgctgccgacagttgtcaatgaggactgtctgctccggctgtggggagagagggaacggccatcagggacaccacgggtgggagccgactctcacatctctggcgttctggcacagaggggtttggcagacatcacagacaagggacatctctcagcaggatggccccttgtctgtgaagctgaggcacagcatggctttggggccatcattcattggttcattcacttttcttcatttactcattcattccaaaatatccactcaacgtctgctgtaggagaaatggtgtgacacagtaactaagggcagatcgcctgggcttgaagcccgtttctgctgtttccaaagtgtgtgactctgggcagttacttcacctctttatggctcagtttcatgatctgcagattgcagatgatagtagcgcctgcctttggaaatataactgagttatattcagataataaccaagttatattcagataataaccaagttatattcagacatgtaaaatttagataaaatgaaaagggtaggccgggcgcggtggcacatgcttgtaatcccagcactttgggaagccgaggcgggtggatcacgaggtcagaagattgagaccatcctggctaacacggtgaaaccccgtctctactaaaaatacaaaaaattagtcgggcgtggtggcgggcgcctatagtcccagctactcgggaggctgaggcaggagaatggtgtgaactcgggaggcggagcttgcagtgaggcaaaactgcgccactgcactccagcctgagtgacagagcgagaccccatctcaaggaaaaacaaaaacaaaaacagaaaagggtttcctttaaaacattcagataggagagatacgtggggtagacatcaaacaagatcgggagaatatggcttatttttgaagctaagtgatgggtaagtacatggacagtcattccactattctcttaatttttgcatgtttgaacgttttcagaataaaaagtttttagatatgtaatgcatatataaaaatatgcacacatagcacttaaaacggtaccagatacatagtaagcactatctacacattttctgttattattaatattatttatgtgaggagaacaacagagagagggttccacccctaggagagctcacagtccccaagggagatggacattagacaaacacatgctccagtcaaagaaaaaggacctacggggacagagtgggagagggaagtagagggtgttagcagctggtataacacatggaaatcttgtctttgtggtcagaaaggctcccttcgtccagacctggaaggcaaagccacaacttgacctggggagtcaggggagggtttaaagcttcagagcccgtggtcatatttagaaagatctttaccactgccacgtggagggtggaccagagggagcagaggtaggagctgggagggacccaggtaggagaggaccagctggaccaagggagggccatggggacggggaaaggagtgggtacaagagacactgaagagactgagtggactagctgtggtggctcccgcctgtaatgctcgcactttgggaggccaaggcaggaggatcacttgaagtcaggagttcgagagcagcctggccaatatggcaaaactccacctctaccaaaatacaaaaaaattaaccgtgtgtggtggcacgtgcctgtactcctagctactcgggaggccgagacaagagaattgcttcaacctgggatgctgaggttgcagtgagcttgaacccgagaggcggaggttgcactccagcctgggcaacagagcaagactatatctttaaaaaaaaaaaaaaaagaggctcagtgggtcgggcatggtggctcatgccattaatcccagcactttgggtggccaaggcgggacgatggcttgaggcctggagttcacgaccagcctgagcaacatagtgagacgcccccatctctatgtgtccacaggaaaattaaaaattcgctgggcttggtggtgcgcacctatagtcccaggtacttgggaggtgaggtgaaggattgcttgagccaaggaatttggggctgcagtgaactatgatggtaccactgcactccagcctgggtgacaagagtgagaccctgactctaaaagaaataaataagaggctaagtagacaggccgtggggctgatgaacagtgggaggggtgagaccccatattctgccccagatgactaggttcctacctcatagtagacaccattgtggtagcagccacattgctggatgggcacgcaggcttggccgttgtagaggaagccggagtcacactggcagccctcagcacacccatctgggcactgcagaggggcactgagagccgagcagcccagggagcaggtgtccgcacagagctcgtagtgactgttctgagggcattccatggctgcaaggagggggtgccgatcagagccctggggagggaggggctgcaaagcccagggtctaccccttctgtgcctcaagctctcccctccctgcccctccggctctccctcactcacgacagaaagtttcattcctccagggctccacgtggcctccagccgcctggcaagcactcacgtaggcatggatgttgctgcagagaatgctcaggttcccaccacccaggcagagatcaaagatgcaatctttcaagggaccctggggatccaccagcttgtggcaggaggacagtggccctgtggggctggagaggagcccacagaactcctccttctgatacttcttctccagctcgggaggacacttgtcgctggggatacagcccgcgctccccggcgggcaggtgggcggcggcaggcagggagagtcgggcaccacctcctcccaggagttgccgaactcattggcgttgcctgcctgcgagccattgggcttctggaagtcatccttggggtcgccgttgtagttcccacacaggccacacatcagctggtagtagtttccagggacggtgacccgcacatagtacacaaggtcgtaggccacacgcaggccgaagtcggtctcaatcacaacatctgaaccatgctgggaggcacggatctggccgttggccagcaccacgggcagcttcatgtccacaccgttcacctgggaggggaagagaggcaggccacgcttcagaaagtatactttgagtgagggtgggaccctagttcaagcccatgcctgatgctgatctttgtgacctcacctcttaggccctcagtttcctatttattaaatggatataataacagggcctgatagtagattgaatggtggtccccaaaagacatattcacacagaatcccatagcgtgagcttactcggaataaagttctttgcagatgtaatcagggtaataatctcaacatgagattatcctggattaaattgggccttaaatccaatgactagtatccttataagagccagaaagaaaaaggcaaagagacacacagaaaaggccacatgaagatgaaggcagggattagaatggtgttgtcacaagcccagagaacctggagtctgcagagctggaaagggaaaggaagatcccccaaccagtgtctttggagggggtgcagccctgcccacaccttgatgttgaacttctggcacccaggactgtggaacatacatttctagtgttttaagccaccaagctcgtggtaatttgttatggcagccatgggaaacgaatacaggtctcgatgaagtaacaagcctccagctatcctttgtttaccgcttgctgcagccattaataagcaatgatcgcccccggagccacttgcccgagttcaaacagtttcccccttaccctctttgtgaccttgggcaagtgagtcacctctccctgtttctgtttcctcatctatcaagtgggaataaggcgtttgccccatggaactgttgtcaggatcacataaattagtatctgtaaagtgctgagaaacgtggctggcatagcatgcatgcttcaggagcatttgctgttattagcagctatgagtggaagtttttcttctgaagagtaaacagaaccacaggtttttgctttaaagcatcagcgagtggaaagttaggctaaattcttggggaaatgaacttaaacctatgagctgaggaccagtggtttcagttaaagatttactaggctccaacaaagcctggtaaatccacccctggacagggcacagtggctcatgtctataatcccagcactttgagaggccaaggcgggaagatcacttgagcccaggagttcaaggtcagcctaagcaatatatcgagatcctgtctctacaaaataaaaaagaaaacaaattaactgggcatggtggtgcatgcctgtactcccagccactcaggaggctgaagtggtaggattgcttgagagcaggagtttgaggctgcagtgagctaggatcacaccactgcactccagccttggtgatagagcaagaccctgtctctaaaaaataaataaatacatcaacccctgattaacatgctttcttacccttccttatcacagacagtgcacaccggattcttttggaaatgtgaagaatcagaggagaaggcaggagaaagacatgctcctggctgagtctcctaaaaagatggtcaactgccacacttcccaagcagggctgggcggtgggtaagggcaactgacttagccttgcctcagtttcctcagctgtaaactgcggggtaataagagctcccacatctgtagggaagctgggggtttcagtaagaagcaactaacaagaacatcaacaactcctgtgtatttaggcgctgtatgtcaggggctattctaggagcttgggaaacattagggaatatattcaattaagtcctgcatgtcggccgggcacagtggctcatgcctctattcccagcactttgggaggctgaggccggcagatcactgagctcaggagttggagaccagactggccaacatggtgaaacccgtccccactaaaaatacaaaaatttcctgggcatagtgttgcacacctgtaatcccagctactctggaggctgaggcaggagaatcacttgaaccagggaggcagaggttgcagtgagccgagatcgcgccactgcactccagcctgggtgacaaagccagactctgtgccaaaaaaaaaaaaaaaaaagtcacgcctgtccagttcgccagattaagtcagtaattgatcagcaccttcgccaatactgccactagaaaaacagctgcgtgtctgtttcagtgggatctcaggggaaacccctccactgtaactcagatgccagtctccacatgagaccaaatcttctcagtaagaaaagcactgcagagcagcacggggttcaagctccacctttgctgggggactatgggccagtgatgggccatcccactctgaaaaataaagcaagtcatagtgcctgcagtccctgttgcaagcatacagacaccatggacgtgaagtgcctggcagccaaaaggtgtgcagtcagctgtatagaaactatagctgctgttgttgttgttaaggcggtgagagtgtcacccacagattgtcctctgtccatgaagcttctcaaactcggactttctcaacctctgatggcaccacgtcctgccaataagtggcagactagggaggtgagtagggcagaatccaggactgaggtggagagaggatggagtgggagggaggagagggtgggagaaatttggagagaaaagtcaatgcatggaggtaaagagagggtggagactgagggacagagatgggggagcagctcccaagtccctgatgacacctccctcattggcttcccactcggttctgactggcatcttctgtcctcagagaccccaggcctcgcacatgcactctcatctcttgtgcccccaactcctgggctgagcgctgcctgtgccccacctacccacaggcccctcgccccctgctccccatctgctctcaccgtgaccttccactgtctctgctccagccgcagggtgaagtttgccacctggaccgtgatcaccctggtcacactgactcgcccattaccccaggccacgttctcctgcaggacggcaaaccgatgcaggccaggccgggtgccgcaggtctgagccagcacatacacgcaggtgcccatgaagtcgaagcggtggccatcgaaggtggtgtagtggggatctcccgacgcctggcaggtggtagagcccacggccacgcagcccaagctgccaccggatggccggcaggtctcatgcgggccgcagctggagggctcacaggacacctcaccgccctcccggcagcggcaaagggaatcacacccagggccagggtagaaggtctggcccagtgggtagtagcggtcatcgtggaggcagccacactggcccacaggtacacacgtgtcaccactgagcacgaagccagcatcgcagacacagccttcacggcaggccgactcacagccctcgggtgccgacaggctcgggcagctcccaggacaggagtcaccgcagagctcgtagtggctgtgggcagggcactggaaggctgtggggacaaggtgggcatcagccaggtaggtgtttgagtcgcagtcttgggaggccctgagtgggaaaactgctcaggccaacttgggcgtctctgggcatgcacatgtgatccaggacatctaactgggggactcagcgtgggacctggaatgggaggggacatgcccaggtctctctgaccaaatatttctgaagatcaaatgactctgcttggctgatattttttttttttttttttttgagacaggctctcactctatctcacccaggctggagtgcagaggcgcaatcacagctcgctgcagcctccacctaaacctcaagcaatcctctggcctcagcctcccgattagctgggactacaggagtaagccaccacatctggctgatttattattattttctgtagagatggggtctcactatgtaagccaggcttacctgggtgaaatggatcacttatatctattcggggtatgcaggatcagaactgactatgggcatctcagcgtgtgaatgtgactggggtgtggggccacatgtatctcagggtatggctctgcctgagggcacccagctgtgggtgtctgacatgcagcatctcccagagtccttctgacatggtctgcctaaggctgtgcctgggtgaagttggcaggatacctgtgaccaggagacctgcctgaagggaaccgcctaggactatctaactatgcatctgtgtggatctgcccaaggctatgccaggatcctgtttctttctgagtgtatctgaccagtcagtataaaatttaagcagatatcactgaaggtatgcgactaattccatgtgactaggtgtatttcagtgtgtgcaacagacctgggccctctgaccagctgaaactcactaggtcttcctaacaaggggtactttgctatgtgacagaggcagggtcagccatcccaatctacatgccttggatacctgaaagcatggatcaccaatccctaagagtgtcctggaccccaggtttcttttctttctttttttttttctgttgtttgttgtttgtttgttttttgttttggagatggaatctctgtcacccaggctgaagggcagtggcacgatctcggctcactgcaacctctgcctcctgggttcaagtgattctcctgcctcagcctcctgagtagctgagattacaggtgcccgccaccacgcccggataatttttgtagttttagtagaggtggggtttcaccatgttggccgggctagtctcgacctcctgacctcaggtgatccgcccgcctcggcctcccaaattgctgggattacaggcgtgagccaccgcgcccacactctgactaggtgtttctaactgactctctctcactgcagtacctgacttggggcatttcagtgtgtcagtgccaaggtgtttcctgacagtagataccgagctcgggaaggaaagtggcccctgagccccatggaggaggaaggggctgctgtcctacagtcctgggaagggcagggagagacccaaccatgtggaccatgcatggagcagtactcacgacagaagtccggccgcctccactcgcggagctgggccccagcggcctgacaggctgccacgtaggtggccactgcaggacagaggcctccaggatggccctgaacttggcaggcgtccagcaagcagccctggaagtactgcgcgggcggcacaaggccgtggcagggcgccagcgggccgtcggtggcggagatcacgccgcaggcgtccgggccgccgaaggactcttgctgctctggggtgcacggcgacgggcatggcttggacacacattccccgcagccctgggcgccgcccacctgccatccggcgggcttcccgcccaccgccttcaggtcgtctgcggggtcctggttgtagttcccgcataagccacagagagagcccgcgtacgccgccggcacgcgcaggcgcacgaagctgtccccatcgaaagccagcgagagccctgaggttgtggtcaccaccacgtcggcgccgctcaggtgtgcgtgcaggagcgagtccagctggaagggcagagtgacgaacacgccgtccacctgtgggcagtgggggagcggtgaacggagcaaacacgggtttgaatcctggccccactacctactagctgtgggacccagagcatgtcacctcccgctgaaaataataatgagcatctataggccgggcctggtggcaaagcctgcaatcccaggactttggaaggccgagatgggaggatcgcttgacgccagaagttcagatcagcctgggcaacatagtgagacccccatctctacaaaaaaatgaaaaattagccagcgtggtggcgtgtgcctttagtcacagatacttgggaggtggaggccaaggcgggaggatcgattcagcccacgagttccaggctgcagtgagccctaatcctgtcactgcgctccagcctgggcaacagagtcaggctaagaaaagaaagaaagaaagaaagaaaagcaagaaagaaaaaaagaaaagaaaaacaaagagcctctactggctcatgtcactgactccttatccttctcgaaaacaggtacttttcctagaccagtttacagaggaatacactaggctcacagaggaagaagctgctgtgccaagccatcaggctcctaggcgtacactctgacccttccatcatgccccagctaagctgtgaaaggggcccaggggaatggtgaagcccttaccatctcaggcaaccccagagctggcacttgctcctgtctggcccacagccctcctcacctgtagcttccggggccagcgggcactcagtgtcaggctgtggttgtagatttgcagggtgacactgcgggtgtagctgacagcctggctgccccggtgctcattggctacagtgacagtgaagttctcagcccccaagggtggtccgtggcagggtgcactcagcaggtactcgcaggtgccttggaaatcgaatcggtgcccatccagagtgacgtaatgggggtcaccccacgcctggcactcagctgtgctgacgggctggcagccgtgctggccggatggcaggaggccacacacttcacccagcccacagctggcaggtgtgcagaccagcgagccacccccaggcccgcagcgacaccactgggagcaggtgccatcagcccaaaactcactgcccgcctcgtggtaggtgccattggcccagcagccgcagccgttgttgaggggaacacagcggtcagcacttaacacgaaacccgcgtcgcactggcagccctccacacaggggccctcacatacggctggcgtcgtaaggggtgcaggggacggacagctggccgggcagggtgggccacagacctcatagtggctgttttctgggcaggtgatctctgtgggcagatgaaggagcaggaaggagagaaacagaaagaagggtgttaggggtggggtcccagaacagggtgggaggagacagagagagacactagggagcagacagagaaagggggagacagaaaacaagacacagagagaggacacagagaaagaaatgggagagggcgagacaccaggagacccaagcagaaactgagggagctagagaatgagaaacagacagatagagacaagcaaagcgaggcccagagacgagcaccaagaaacagagagacaaacagagaaaaaagaaaacaaagagacccagaaggaccagagtgaaaccaaaccagccccgaagagatgggaccccgcccccagccccgcctctgctcccccaacactcaccacagccaacctgtgcccgccagtcttcgatgacaaccccagcagcctggcaggcggccacataggaagccagagccttgcaaagaatgtcacggtccccaccacccatgcagacgtccagaacacagcccttgaagaagctctcaggtggcacatgagcatggcaggtggtgaaagggccccctgtgccgggggccaggggtccgcagaagccagggccctcgtactgctccaaccggtcctcagggcacgttgggcaggacccccgacattcgtcccaacacagtgggtcccagcctggggctcgccagctgccgccccagatgggtatggagggagccagtgtgccattagggaagacctggtcattgttggggttgcggtccatgttaccgcagagcccgcacactgcgccatgatagctgctgggcagcgtcacgtctacccgccagttccagtcatagctgacttgcagtccaaagtcagccaccagcagtgccttcgatgcaccctgggtcactgaaatccgcccgtcggccacagagacaggcaaggctgtgagcacaccgttcacctgggggaaggagggaaggcaaacgggtcactggaggttttacggccccagctctggccctctgcctccctctctctcatcccaccgggggctgggagaggccagggccttcccccgagagttggattgtcatctgacacactgtggacagttgttctagcccaggtcttggggaacgaaacctcactttactttttctagatcttctcccttcatctctatctccctcccctgtctctgtctctctctctgtgtctctctccctctgtcttcacctaaggctatgcctctgggtcttctctctctctgtctctgtctctctctctctctttctgtctctctgtctctgtctcacccttttcccttcctccctacctccctcattctttgtgcatctcttccactcactcaccatcatttattcagtgcctactctgctgcatccctcagtctctccatgtgagctgccatcaagctacatctccatttccttgggcagaaaggatagcccattcctctcccccatctccctatatttctttttcttgattactttttttatttttcagacggagtctcactatgtcaccgaggcttgtgtgcagtgttgcagtctcggctcttgtaacctctgcctcccaggttcaagcaattctcctgcctcagtgtcctgagtagctgagaattcaggagcatcaccacacccagctaatttttgtatttttagtagagacggaatttcaccatgttagccaggcttgtctcgaactcctgacctcagatgatccatcggcctcggtctcccagagtgctgggattacaggcgtgagccaccgggcccagcccagtctccctgtatttctctccatgtcctggtctctgggcctctcacttttccctcaccgacactcaaacgactgttcacctggactagactctgagctcagcatgtgacatgcacggccttgctgtgggggaggccctgatacgatgcccacttcacagatgaggaaactgaggcctaccaagtgaactgcccagcatcacatagctcataaggaggagaggctggattgaaacccaggtctataaaaaaggcaaatgctgaggtcctatgttaaagccctttgccaggggctaggctcatttaattcccagtaacagggtgatatttttgttgcaattattctctttgttgacagtttgtttcaggcccaggtgaagacaaagagccttgagctgctaactgtggtcgtcaggatccctcctgccctcccggggacctcaggggaccatcctgccacacatacccggactttgccgatctcgtccttgtggatggagatgttggtgccgagggcagccacggtgacgactctcacgtaggacacagcagggttgccccggttctggttcttggtggtgacggtgaagggtgtcaggccctgggtgctgacccccgggcagccagttgttgccagcacatagttacaggtgccctggaagtcaaacttccggccatcgaaggagtggtagtgtgggtcgccccacagccagcacgtggcctcatagttgggcaggcacacgccctggccaccctgctccttgcatgtctcctgtggccggcatgtcacgccgtggcacgggtctggggacagaagagggaggaggaccttgaggggctgcccattgtaaagcatggccgctccctccacatctacccagtctgtgccagggatctgagggttactgcaggcaagaccacattacagagtcctcatgtctaggacccacttcctatagtttgcttttacattttcttttgttttgttgtttttttgagatggagtctttctctgtcacccaggctggagagcaatggtacaatctcggctcactgcaacctctgcctcctgggctccagtgattctcctgactcagcctcctgagtggctgggattataggtgcccaccagcatgcttggctgatttttgtatttttagtagagacagggtttcaccatgttggccaggctggtctcgggctcctgacatcaagtgatcagccaaccttggcctcccagagtgttgggattacaggcatgagccatcatgcccagcctgctattttcaagaccagcccctgggagtcccacacagctgacactgaggccccatgggggactgtgtctaagtctcggctgtcaaaggtcccatacctgagacctgggccccagaggtctgtacagccaagacccagtacctagagttcccctacttctgagactgaggccctgccatttgctgtgtgagactgagatcctggagtccacgcacctaagaccaaggtaaagaccaaggctctgggtctgtgtttaaggtgcactttccatggtgcccttgcttgagatttcaccctgttcttgtattttaagttttataggaacctcaccgtcttcacttacataggctacggctgctttcacaccacagtggcagagtgagtagttgtgatccagaaggtatagcctgcaagcttaaacacttaccatctagccctttagagaaaaggtgcacttgaccccagttgagatctgtgccccaggggtccttgtgtctgcgatgccagccctgagagcatccatgtctgagatcccagccccagggttctctgtgttcaagacctgggccccaggccaggtgtggtggctcaggcctgtaatcccagcactttaagaggctgaggtgggaggatagcttgagccctggagtttgagactagcctgggcaacatagtaagaccccatttctacagaaagattaataaattagccaggcgtggtggtgtgtgcctgtagtcccccactactcgggaggctgaggcgggaggattgtttgagcccaggaaatcgaggctgcagtaagctacactacactctagcctgggccacagagtgagaccttagctcaaaaaaaaaaaaaagatctaggtctcagggtcccccatgcctgagacctcagccccctggacatctccacatttgatagaaattggtctccaatttctctaggtcctggaggcctctgtgcccaagactagggccctggggtgatcttctggcaagagcccagtgccagggtctcagcaggatttgaaatgtttgagaccctaactagctaagtctcatgggctgggctccctcagtgcaagactccatccctgagggttgctgtattcaagacagtagccttgatcgtgtctcactgctgaggccctgtcctggggggtttctgtgtccgagaccctgttcgtacagttactacatctgtgaccccagcttgcggaacccctgtgtgggagaggccagccttcaaacgtctccttcctcctgtgtccattatctatgtaccgcctctcagcttcaaatacacccacggagttaagctttgtcaacagagggcgccggagagtcactgcaggagggacggtctcctggtctggcttctagccagtttggtccttccagctctggccagggtgcggggccacattcagcgagtgccactggccgcagctggcttcccagtgaggggttcccttcttgccaagtccagcctgcagaaacctctgtgccacccagtgggctacagctgcagtgagactggactcagccttggggctgattctcccctccttgaagagtaggggccaatttctcccttccatgaggcttttaccttagccctagagtggcggctacttcctgtgtgtgctttggtggtattctttagtgctctctttaccgtttcttatttctgtttatttgtttgtttgtaaagagacaaggtcttgctgtcttgcccacgctagagagcagtggtgcaatcatatagctcactgcagcctcgaaatcctggggtcaactgatcctcctacctcagcatcctaaatagctgggaccacgggcacgcatcaccacacctggctaattttcaattttttgtggagacaggggtctcgctatgttgcccaggctggtctcaaactcctggcctcaagtgatcctcccaaagttctgggtgtgtgagccacggcaccagaccctctttacccttaatagttaatctcctattaataagtaagtgattctttaattaaactttcctcattcaaatggccatacgctttctgtctctcgactagatgctgagtgatataccccccatttctgggagtccccattatcctgctcatcagccctgagagtcttagcccccactccttggtgctggagctcccattctcttatccttagggggaggagagttctctgctcttcaccctaagaaatgagccctgggggtggctgtgtcccagatttagtctgggggattcccacatcagagactatacccccagaaatcctgatcttccagttaagaggggtccccatatccaatgtcctgccttggtgaggtctccgtgcgtgagactcagaactctgctctctgtccctgcccctgggatcccagtctctcccctgccctttggtgctagtgtctgaaccccaagtccaatcccacacatcagtgttccgctcatgatggccccctaggctgctgctcttgtattctaaagtcttataggagcctgacctcttcacttacatagtctacggctgctttcatgccacagtggcagagtgagtagctggaacgagaacctacagcctgcgagcttaaacatttaccatgtagcacattagagcaaaggcgcgcctgtccctgccttataccgagggtctctgacatccaccctgagaaaactatctctgagggtccccacagcctggattttccctaagggtccctacctcccaaagtaggtggccctggccctgtgaaacctggtctagggttccccaggtctgcaacctcaatcattagtcctgtacacctcccgccatggacaccccagttacactaccctcagccccagagtccccatcctccatccctagtcccatcagccccagtcccagcccagcccagcccagcacctttggtgacgcagctcaggatgcctccggagggctggcacacctgccccggcttgcagctgtgttcctggcacaccacgactttacccgcatggcacgtgcactgctgccgacagttgtcaatgaggactgtctgctccggctgtggggagagagggaacggccatcagggacaccacgggtgggagccgactctcacatctctggcgttctggcacagaggggtttggcagacatcacagacaagggacatctctcagcaggatggccccttgtctgtgaagctgaggcacagcatggctttggggccatcattcattggttcattcacttttcttcatttactcattcattccaaaatatccactcaacgtctgctgtaggagaaatggtgtgacacagtaactaagggcagatcgcctgggcttgaagcccgtttctgctgtttccaaagtgtgtgactctgggcagttacttcacctctttatggctcagtttcatgatctgcagattgcagatgatagtagcgcctgcctttggaaatataactgagttatattcagataataaccaagttatattcagataataaccaagttatattcagacatgtaaaattcagataaaatgaaaagggtaggccgggcgcggtggcacatgcttgtaatcccagcactttgggaagccgaggcgggtggatcacgaggtcagaagattgagaccatcctggctaacacggtgaaaccccgtctctactaaaaatacaaaaaattagtcgggcgtggtggcgggcgcctatagtcccagctactcgggaggctgaggcaggagaatggtgtgaactcgggaggcggagcttgcagtgaggcaaaactgcgccactgcactccagcctgagtgacagagcgagaccccatctcaaggaaaaaaaaaaacaaaaacagaaaagggtttcctttaaaacattcagataggagagatacgtggggtagacatcaaacaagatcgggagaatatggcttatttttgaagctaagtgatgggtaagtacatggacagtcattccactattctcttaatttttgcatgtttgaacgttttcagaataaaaagtttttagatatgtaatgcatatataaaaatatgcacacatagcacttaaaacggtaccagatacatagtaagcactatctacacattttctgttattattaatattatttatgtgaggagaacaacagagagagggttccacccctaggagagctcacagtccccaagggagatggacattagacaaacacatgctccagtcaaagaaaaaggacctacggggacagagtgggagagggaagtagagggtgttagcagctggtataacacatggaaatcttgtctttgtggtcagaaaggctcccttcgtccagacctggaaggcaaagccacaacttgacctggggagtcaggggagggtttaaagcttcagagcccgtggtcatatttagaaagatctttaccactgccacgtggagggtggaccagagggagcagaggtaggagctgggagggacccaggtaggagaggaccagctggaccaagggagggccatggggacagggaaaggagtgggtacaagagacactgaagagactgagtggactagctgtggtggctcccgcctgtaatgctcgcactttgggaggccaaggcaggaggatcacttgaagtcaggagttcgagagcagcctggccaatatggcaaaactccacctctaccaaaatacaaaaaaattaaccgtgtgtggtggcacgtgcctgtactcctagctactcgggaggccgagacaagagaattgcttcaacctgggatgctgaggttgcagtgagcttgaacccgagaggcggaggttgcactccagcctgggcaacagagcaagactatatctttaaaaaaaaaaaaaaaaagaggctcagtgggtcgggcatggtggctcatgccattaatcccagcactttgggtggccaaggcgggacgatggcttgaggcctggagttcacgaccagcctgagcaacatagtgagacgcccccatctctatgtgtccacaggaaaattaaaaattcgctgggcttggtggtgcgcacctatagtcccaggtacgtgggaggtgaggtgaaggattgcttgagccaaggaatttggggctgcagtgaactatgatggtaccactgcactccagcctgggtgacaagagtgagaccctgactctaaaagaaataaataagaggctaagtagacaggccgtggggctgatgagcagtgggaggggtgagaccccatattctgccccagatgactaggttcctacctcatagtaggcaccattgtggtagcagccacattgctggatgggcacgcaggcttggccgttgtagaggaagccggagtcacactggcagccctcagcacacccatctgggcactgcagaggggcactgagagccgagcagcccagggagcaggtgtccgcacagagctcgtagtgactgttctgagggcattccatggctgcaaggagggggtgccgatcagagccctggggagggaggggctgcaaggcccagggtctaccccttctgtgcctcaagctctcccctccctgcccctccggctctccctcactcacgacagaaagtttcattcctccagggctccacgtggcctccagccacctggcaagcactcacgtaggcatggatgttgctgcagagaatgctcaggttcccaccacccaggcagagatcaaagatgcaatctttcaagggaccctggggatccaccagcttgtggcaggaggacagtggccctgtggggctggagaggagcccacagaactcctccttctgatacttcttctccagctcgggaggacactcctcgctggggatacagccctcgctccccggcgggcaggtgggcggcggcaggcagggagagtcggacaccacctcctcccaggagttgccgaactcattggcgttgcctgcctgcgagccattgggcttctggaagtcatccttggggtcgccattgtagttcccacacaggccacacatcagctggtagtagtttccagggacggtgacccgcacatagtacacaaggtcgtaggccacacgcaggccgaagtcggtctcaatcacaacatctgaaccatgctgggaggcacggatctggccgttggccagcaccacgggcagcttcatgtccacaccgttcacctgggaggggaagagaggcaggccacgcttcagaaagtatactttgagtgagggtgggaccctagttcaagcccatgcctgatgctgatctttgtgacctcacctcttaggccctcagtttcctatttattaaatggatataataacagggcctgatagtagattgaatggtggtccccaaaagacatattcacccagaatcccatagcgtgagcttactcggaataaagttctttgcagatgtaatcagggtaataatctcaacatgagattatcctggattaaattgggccttaaatccaatgactagtatccttataagagccagaaagaaaaaggcaaagagacacacagaaaaagccacatgaagatgaaggcagggattagaatggtgttgtcacaagcccagagaacctggagtctgcagagctggaaagggaaaggaagatcccccaaccagtgtctttggagggggtgcagccctgcccacaccttgatgttgaacttctggcacccaggactgtggaacatacatttctagtgttttaagccaccaagctcgtggtaatttgttatggcagccatgggaaacgaatacaggtctcgatgaagtaacaagcctccagctatcctttgtttaccgcttgctgcagccattaataagcaatgatcgcccccggagccacttgcccgagttcaaacagtttcccccttaccctctttgtgaccttgggcaagtgagtcacctctccctgtttctgtttcctcatctatcaagtgggaataaggcgtttgccccatggaactgttgtcaggatcacataaattagtatctgtaaagtgctgagaaacgtggctggcatagcatgcatgcttcaggagcatttgctgttattagcagctatgagtggaggtttttcttctgaagagtaaacagaaccacaggtttttgctttaaagcatcagcgagtggaaagttaggctaaattcttggggaaatgaacttaaacctatgagctgaggaccagtggtttcagttaaagatttactaggctccaacaaagcctggtaaatccacccctggacagggcacagtggctcatgtctataatcccagcactttgagaggccaaggcgggaagatcacttgagcccaggagttcaaggtcagcctgagcaatatatcgagatcctgtctctacaaaataaaaaagaaaacaaattaactgggcatggtggtgcatgcctgtactcccagccactcaggaggctgaagtggtaggattgcttgagagcaggagtttgaggctgcagtgagctaggatcacaccactgcactccagccttggtgatagagcaagaccctgtctctaaaaaataaataaatacatcaacccctgattaacatgctttcttacccttccttatcacagacagtgcacaccggattcttttggaaatgtgaagaatcagaggagaaggcaggagaaagacatgctcctggctgagtctcctaaaaagatggtcaactgccacacttcccaagcagggctgggcggtgggtaagggcaactgacttagccttgcctcagtttcctcagctgtaaactgcggggtaataagagctcccacatctgtagggaagctgggggtttcagtaagaagcaactaacaagaacatcaacaactcctgtgtatttaggcgctgtatgtcaggggctattctaggagcttgggaaacattagggaatatattcaattaagtcctgcatgtcggccgggcacagtggctcatgcctctattcccagcactttgggaggctgaggccggcagatcactgagctcaggagttggagaccagactggccaacatggtgaaacccgtccccactaaaaatacaaaaatttcctgggcatagtgttgcacacctgtaatcccagctactctggaggctgaggcaggagaatcacttgaaccagggaggcagaggttgcagtgagccgagatcgcgccactgcactccagcctgggtgacaaagccagactctgtgccaaaaaaaaaaaaaaaaaagtcacgcctgtccagttcgccagattaagtcagtaattgatcagcaccttcgccaatactgccactagaaaaacagctgcgtgtctgtttcagtgggatctcaggggaaacccctccactgtaactcagatgccagtctccacatgagaccaaatcttctcagtaagaaaagcactgcagagcagcacggggttcaagctccacctttgctgggggactatgggccagtgatgggccatcccactctgaaaaataaagcaagtcatagtgcctgcagtccctgttgcaagcatacagacaccatggacgtgaagtgcctggcagccaaaaggtgtgcagtcagctgtatagaaactatagctgctgttgttgttgttaaggcggtgagagtgtcacccacagattgtcctctgtccatgaagcttctcaaactcggactttctcaacctctgatggcaccacgtcctgccaataagtggcagactagggaggtgagtagggcagaatccaggactgaggtggagagaggatggagtgggagggaggagagggtgggagaaatttggagagaaaagtcaatgcatggaggtaaagagagggtggagactgagggacagagatgggggagcagctcccaagtccctgatgacacctccctcattggcttcccactcggttctgactggcatcttctgtcctcagagaccccaggcctcgcacatgcactctcatctcttgtgcccccaactcctgggctgagcgctgcctgtgccccacctacccacaggcccctcgccccctgctccccatctgctctcaccgtgaccttccactgtctctgctccagccgcagggtgaagtttgccacctggaccgtgatcaccctggtcacactgactcgcccattaccccaggccacgttctcctgcaggacggcaaaccgatgcaggccaggccgggtgccgcaggtctgagccagcacatacacgcaggtgcccatgaagtcgaagcggtggccatcgaaggtggtgtagtggggatctcccgacgcctggcaggtggtagagcccacggccacgcagcccaagctgccaccggatggccggcaggtctcatgcgggccgcagctggagggctcacaggacacctcaccgccctcccggcagcggcaaagggaatcacacccagggccagggtagaaggtctggcccagtgggtagtagcggtcatcgtggaggcagccacactggcccacaggtacacacgtgtcaccactgagcacgaagccagcatcgcagacacagccttcacggcaggccgactcacagccctcgggcactgggaggtctccacaggacagcgggcagccgtaggaacacgcctcatagtggctgtggggtgggcagctcagtgctgcagggagaggagacatcaagatcaagaattcctgctcccaggtcaggagttcgagacacactcacatacaagtggtccctcaacacattcgtatgcacacaaacactcaaacacactcacacacaagtggtcccccaagacattcatatgcacacacacgctcaaacacactcacacacacacaagcggtcccccaacacattcgtatgcacacacagatgctcaaagacactcacacacaagcggtcccattgcagggtgcttggggaacacattacatcgcagttaatctgatcctgataattaagattctttcccaatttaactatggtttggagttatctattatggttttttttttttttgagataggggtcgctctgttactcaggctggagcgcggtggtgcttgctatcacagctcactgcagctttgacctcctgggctcaagcaatcctcccacttcagcctcctgagtagctgggactataggcgtgcaccatcatgcctggctaactgttcaaattttttatagagatgcggtctcgctatgttgcccaggctggcctcaaactcctgggctcaagcagtccacctgcctcagcctcccgaagtgccgggattgcaggaatgagccaccacacccagccttctattatgtctttaatgaccttattcaagttggatacatggtgttgatatgtggcatatattttaaacatgcatatgcatatatttctgtgtttgtataatctatgcaatatttgtgaatgcaatacttttagcttcttccttctatagcagtaattaaaatatttagccagtgttataaagaaaaaaagaaaaacctccctgctcccctccccaaactccagtcactccataaaaagcaaatctaagtgactaaaactaaaccacattaaatctctatctgtgctgtcaaatacagtagccactagccacttgtgaccatttggatgtaagttaattaaaatgaaacaaaattgaagatttagctcctcagtcacaacagcctcattgcaagtgctcagcagccacatgtgacctgtggtgacctggtatgtatttgaacagctcaaatatggagctgtcatcattgaagttctgctgggtggtgctgttctgaagctgacatccagcttacaggagaatcatggggacatagggacaagttcaataacactccaaaatagcaactagccagatcctgaaagtatgaaattctgcaggataaataacctatctttcccagtaaataagtgacatagacaaaaggaagagctggatggagggatagctatgtgataaggcaaatgaatgaattagaattagagtgaagaggccgggcgcggtggctcacacctgtaaccccagcatttttggaagccgaggcaggaggatcacttgaggtcaggagttcgagaccagcctagccaacatggtaaaacccgtttctactaaaaatacaaaaattagctgggcatgatggcgcacatctgtaatcccagctacgtgggaggctgaggtgggagaatcgcttgaacccgggaggcggaggttgcagtgagctgagattgcaccactgcactccagattaggcaacagagtgagactccatctcaaaaaaaaaaaaaaagaaagaaagaaagaaagaaaaaagaaaagaaaaagaattagagtgtagagtccaggtggtaggtttatgggtcttcactgtaaaattctttcaacttttttgtatatttgacaattttcataatactatgttgggaggaacaaaggaaggaaattctgacagagtaaaagcaaagaggtagatcaatccaatgcagtatgtgtatttggtttggttctagagccaaacaaaatagaaaaaaacctttttttttttttagacaattgggaaaatttgaacccagattgggctttacatgatgttagggaattaatgttattgttgttactggtaattaccacatgccctcatatctctttctttcttccttcctttttttttttttttttttagagacagggcctcactggagtgcagtggcacagtctcgcctcactgccacctccacctcctgggctgaagatattctcccaccttagcctcctgagtagctgaaatgataggcactagtcaccatgcccggcttattctttatttttatttttgtagagactgggttttgctatgttgctcaggctggtcttgaactcctggcctccagcgatccttccacctaggcctcccaaagtgctgggattacaggcatgaaaagcaaactcctgtgccttaaaagtccttttttgttgctgaaaagcagatgcttactgaagtagttagaggagaactgatctgcctagaatttgatctaaaatattctaccaaaaaagagggggtggagtgagaggtagaggaactaagaatggcaaaataccaataattgttcaagctgggtcaggcctccgtctgcatatctaagacctcatgatccagtcttctagaacttccaggtggtacaaggaaaggagtagttttaaggaaacaagagattctcaatttccacacaggccacagagtctgataattaacagcacaaaatcaggagccagcctgttcaaatcaccccaccggctgtgtgacctcaggctagttccttaacatctctgtggttcagtttcctcgtcttgtaaaataggaataagagcaattctgcctcacggggtggttgtgaggattcaatgagaaacccttagaacaggacctgcccagtgggatgcgtgtcacacaactgctagctggaattatacgtgtcctgcctaaaaggacagcccaagaatgctctgttagaagagcattcccacttcccattgtccacctgtccccttcacaagtgtgcttcctgcactttacagaagagaacagtgcagtcccccacccatcctgaatctttttttttttttttttgagacagggtctcgatctgtgggccaggctggagtgcagtggtgcgatctcggctcactgcaatctctgcctcccaggtttaagctaagattctcctgcctcaacctcccaagtagctgggattacaggcgctcaccaccaggcctagctaacttttgtattttttgtagagacagggttttgccatattggccaggctggtctcgaactcctcacctcaagtgatctgcccgcctcagcctcccaaagtgctgggattacaggcatgagccaccacacccagccccatcctgaatcttaacacatggcacagtgccctggagtgtgaaacctctgaggacataaacggacgatttcaaatattgctatcgctgtgaacacaacgaatgctgaatcattattgagtaataaatcaaaaggagggcctaatagaattggctgctcacagataatataaaataaatttgtcgtgtctcactgtgtgccttccctatgactcagaaggggttcagagcacggagtgatgttactccacctgcactctgtccactcccacccacttattaatatcatgtaagccaggagctgtggctcaagtctgtaatctcagcactttgggaggccaaggcgggaggaaggcttgagcccaggagtttgagaccagcctggacaacatagcgagatcttgtgtctacaaaaaataaaaaattagccaggcatggtagtgtgcacctgtagtcccagctactcaggaggctgacacaggaggactactcgagcccaaagatggaggctacagtaagctgtgatcacaccactggactccagcctcggtgacaggataataccttatctcaaaaataaataaatatcatatctacaaaaatgaaagataggattagaattgatgctgaaccctgtctcattctaacaatatatgtgaaatattgggtgggggtaagctcactgagtgatgccattacaatggccattacaatttacttctgtttaatatttttatcaattgtgcacaaacaattcttgcaatgatatcttactccattaaaaaaaccacttagagtcttagagtctcaggaatttctaaaacttcttatatcttttataagaaggctgttttgtcctgggaggtttcacaccccagggcaacatgccacgtgttgagatttgggatgagtggagactgcactgttattattttattttattttattttattttattttattttttgagacagaatctcgctctgttgcccaggctggagtgcagtggcttgatctcggctcgctgcaacctctgcctcctgggttcaagcgattcttctgcctcagcctcccgagtagctgggattataaaaattctgaaatcttagtcatagatgtgtatgtttgtggcagagaagtgtgatggcgattgtgacacaggctgccaatggtcacgtcttgactctgggcatgaccatggcacttgctttggccaatgggacattggccaccatgataccaagtagagccttggaaagtgcttgcacactggggcttgtgtgctcttaggaatcttgagagcaccttgggaagaagccttggctcacctgctggaagatgagaccaagtagagcagagacaagaattcccagctgagggccccccaaaccaaccagcttgacaactgccagatgtgtaaaatcaccctagattacccggccttggctgagcctccaacagactgcagagatcaaccaagctggcccaggctgggagaacagctcagcagcccccagaatcatgagaaagaataaatacttggccgggcatggtggctcacacctgtaatcccagcactttgggaggctgaggcgggcagatcacctgaagtcaggagatcgagaccagcctggctaacatggtgaaacccccatctcttctaaaaatacaaagaattagccgggcatggtggcacatgcctgtaattccagctacttgggaagctgagacagaagaatcacttgaacccaggaggcggaggttgcaatgagccgagatcacaccattgcactccagcctgggcaacagagcgagactccatgtcaataaataaataaataaataaataaataaataaaaataaacacttgttttaatgcactcagccactaagccttgggttgtttgttaggcaccaaaagccagctgatacagtgactttaacaaaagacttccatgcattcaaatgtgttacattaggttaaattctgttagaactaaaaagcattagaaaatcagttcagaaaggcaaggatttgttttcttattctctcccctattgtatccggagtgtttagaatagtgcctggaatacagaaggtatttttgaatgttttggatatttgttgaatgaatgaatgtaagttgaaggagaaaaaggaatgatgtatttatcctgtatttttcagtggacaatgatgtgtaccactgtgtgctatgtatctgttgaatacatttaaaagaggagcataagtcaagtaatggtttcattttgaaataccaatattatgttgataattgtggaaactaaatgatggatatatgctggctcactatcctagtttactttggatatgtttaaatttttccctaataaaaatgttcttaaggccatgagcagtggctcacgcctgtaattctagcactttgggagaccgagttgggcggatcacttgaggtcaggagttcgaaaccagcctggccaacatggtgaaaccccctctctactaaaaataccaaaaaaattagccaagcatggtggcgggcgtctgtagtcccagctacttgggaggctgaggcaggagaattgcttgaacccaggaggcggaggttgcagtgagctgagatcgtgccactgcactccagcctgggtgacagagtgagactccatctcaaaaaaaaaaaaaaaaaaaggttcttaaaagtcaaaagttaccatttgttagaaattataagttttatgattatttcaggtgaaaaactagacatgtatgcttctattaattccaaaattcaaaaactttagaagtcagaatagtggttacctcttggggttgggaacctggattttttttttttcttgaatttgggacagttcacacaggtttgttctcttggtgaaaactgatcaagctgttagcttatgatatgtacatatttttaaatatctgtattatatttcaataataaattttttaaattaaaaatcgggtgagaggaaactggtacgatggctcacacctgtcatcctagtattttgagaggccgaggcaggaggattgcttgagcccaagagcccgagaccagcctgggcaaaatatcaaaaccctgtctctataaaaaatattttaaaaattagcgggggatggtggtgcaagcctgccgtttcagctactcaggaggctgaggcaggagaatcgcttgagcccaggagttccaggctgcagtaagctatgattgcaccactacactccagcctaggcaacagagcaagaccccatcttaaaaaaaatcaggtgagaggatgcatggcttttcaaacttctttcataggcaagcaaaggtgttggaaaaccattcatgcacccacctctgaaacaaggctctcaaactgactgcccaaggggtcaggcagatgtaaataagcgaggtaggatagatggggaccaaaaagaaccagagaggggatgagactcctaatgacaatactgttgctcatatctcaatgacagctgttatgtgggaatcagaccctgggccaccaggtgtactcagtcattttacaaataccaactgccgctgggcacggtggctcacgcctgtaatcccagcactttggaaggctgaggtgggcggatcacgtggtcaggagatcgagaccatcctggccaacatggtgaaaccccatctctactaaaaatacaaaaattagctgggcttggtggcgcatgcctgtaatcccagctactctggaggctgaggcaggagaatagcttgaaccagactcagaggttgcagtgagccgagatcatgccactgcactccagcctggtgacagagcaagactccatctaaaaaaaaaataccaactgcatgcccaccatctgtgattttctagctatcatgatcccaggtgtgtaactgaacctttctgaacttcaatttcttcatctgttaaatgggtataaccacaatccctacctcatagggctattataaggattaaatgaattaatgatatttatacattaatgaatatatataaggctgagtcccccagttgccacttccgatactcacggcaaagttcttcactcctccaggggtgcactgtggctccagcagcctggcatgcagcagcataggtggccagtgcgtcacacagtggcccagactggcctggcagcaggcagcggtcatagacacagtcgcgcacggcaccctgggggtccagcttgctatggcactcccggaagggccccttggggtcggcaaggattccacactcattcttgctctgcagctgctgggccaccagggagtccagcttgggacagtcacccggttcagttgctccacagccgggcctcgtctcttcttgccagctgttcccaaaggccagtgcattggcagcttgacccccaccccgcagagccaggtcatcagctgggtccccgttgaagttcccacagagtccacacagggcctcagcatagctgctgggcaccttggcagtcactcgtgcattccagtcataagtgacagtcaggccaaagtccgtgcgcacgacggcatccctgccctgtcggaacacctgcacctgcccatctgctgcttggaagggcagatactgaaggacgtcatccacctgggtggagatgcaagagggccacctggtcagggtattcacagttctgtggcccacccttcaattcactcacctccagctaccctgacctccttgctattctcttggacatattacgctcagtcccacctcgaggcctttgcacttgctgttccctctgcctggctcaccattcacccctcttcattcctaaagcaccagcttaaatccaaatccctcacccatggccttcaaaacctacatgatctgtctatctccccattacctccctcgcctcacctcttctcactgtccctctcactcaggctgctgcaaccatactagctttcttttctttttttttttggacagggtctcactctgttgcccaggctggagtgcagtggcacaatcttggctcactacaacctctgcctcctgggttcaagcgattctctctcagcctccctagtagctgggattacaggtgtgagccactgcacctggctaatttttttttctatttttagtagagagggggtttcaccatgttggccaggatggtctcaaacctcagatgatccactcgcctcagcctcccaaaatgctgggattacaggcgtgagccacggtgcccagccactagcttcctttttaaaatagagacaggggtctcactctgtcacccaggccagaatggagtggcacgatcatagctcacttcctagcacttcaggaagctgaggcgggagggtcacttgagcccaggagttggagaccggcctgggcaacttagtgcgactccgttctgcacaaaaaggaaaaaggaaaacgaaaaaaataaaatcttctaacaggcctcccccaccctcaggcccatccagaactccaagtcttcagagggtatttcctgctccgtcacccagccctgggcgccacgtcgctcaccagcacttgcccggggtactcccggcgcacggccaccttcaccccgcgggcctccacccgcacggcgcgcgtgtagctcacagtctggctgccccgatgctcgttttccaccagcacccggaaggcaggcagcgctgcgttctggccgcatgagccgaccagcaggtacgtgcaggtgcccatgaagtcgaagcgccggccgtcgaagctcacatagtgtgggtccccggacccctggcaggtcccgaagcgatcggggtagcagcccaggaggccgttctggacgctgcagcgctcacccgccgggcagctctgcttgtcgcggcaggtgacctgatgggtggcgccgttgcaggtgcagcgcctttggcacaactcgtccgcccacacttcctggcccggagcgagctggagaccctggaaggtgcagccacacgacgaggccggcacgcaggcgccgccgctggccacgaagcctgggaggcacacgcagccctccacgcaggggcgcccggagcagttggacggcgccgcagccccgttgcaggaggtcgggcaagcagggccgcagagctcatagcggctgttggcagggcaggacagggctgcggggagatcagagagggtggatcaggcccgcgtagcaggggccgtcgaagagcgccctgtcggggacggcgcccaggaattccatccccaaaccctgctcctctctcagagctcgccatctcagataatggcactgccattcttctgggtgctcctgcgccacaccccagcgacgcagttaatctccaccccgccaaccccctaacgctcactggacaaccaatctgtcagcaagtcctgtgagctccatattcaaaatctacccagattggccgggagtggtggcgcaggcctgtaatccgagctactcaagaggctgaggcaggagaatcgcttgaacccggaaggcggaggttgcagtgagctgagaccacactactgcactccagcccgggcgcagagcaagactttgtctcaaaaaaaaaaaaaaaaatccacccagttacagaatctgcctctgatcctatccaccgcagcagcctcctgcctgggctccctcctgcccccacagcctgttcctcacaccaggccgaggaatctgggaacatctgggtcagatcaggtccctccccatctcagagcactactgtggcttcctctcactcagggtaaacgccagagtcctccccatgcctcaggaggccctgtgccatctgttcctctcacctctcagccctcacctcttctccctctccctcgggctcactctgccccagccccagctgcctcctcctcccgggtcctcaccctcccacctcagggcctttgcattggctgttccctctgccttccctttccccagaaagcccactggggcccaggtggcctgggttcagatcccagatctctccttctcggccactgactccaatctccccgtgcctcagtttccccatcagtaagatgggataatgtagtcgagacctcacagggttgttgtgaggattaaatgagttgatctatggggaaacattctgtggacatcactgttagttagtacttagctgactccattgcctgaccctggtctcagctccaatgttacctgcccagaaaggccttccctgatcaccctcttcacgagcctcacagtcactgtcattgaatgaacttgtttctttgcctctctgaagatacttcctagttcatctgctcactgtctgtgtccctcccctgccgctaagagagaagttctgcgggagtggggacctgatctgtctcaatcactgctgagtccccagcaccaaggacagggcctggtacgcagcaggtgctcaggaaatactgcagaagtgaaagggagaataaatgaactctctgattcctattttgcgccaggcatggggttgggggggtgcttactgggcagtggggacacagaactggccaagacaaacacctagtggcctctatgtctgccctgtacttactccccctccctctgggcctgggcctggatgcctcttcctccctcctacctgtcctttctgcctctgggacatgtctctaggagcctcactcacaagggcaggaatagatttatgctggtcttcactgtgtcttcaatatcattagcatgcacagggggcaggcaggggttcaaggaatgcttgtggaatgaatgagtgaacgattaagcagacggacacctggctaaagagcctggactttatctagagggcaatgggagtcatgggagggctataggcaaaggaagagacgtcacgtctctgtgttgggattctgcagacaagaattcccgtcctgccaagcctttgagcatgctgttctctgggcctgcaactcacttcctcctctttctcttggcaacttccagcccctcttatgggtttcaaattggacatctttctctagaaaaccctccctgaccacccctgctccccaggctgggccaggaacctcctctggtttcccatagccccactgacttcctccatcctggccccaacccctctgcctgtgtcccccgcaatcccagccctgactcatctgcctgtctctctcccatcctggccccaacccatccgagtgggcctccccatcctgcctggacccctccagactgtcaatgtctagtgaaacgtctctccaaccttaggctcattgtggacagagctggctgtcttggccatcactaggcccctggcattgcccagcaccaggctgaaccataataacttctcagatattaagcagatgctagggatctcctgcccctcactgtatgctcccagcccccacccagggcatcactcacggcagttggctggtgatctccagtccccaaccgagatgccaagctccagacaggcctgggcataggcgctgaggccacggcacaggctgagccgctccccaccgaccacacacaggtcatatacacactgctccaggaagggcctggggtccagggtgtcatggcagacagcgaaggggccatcgagcttggtcagcatgccacagagtcggtcgccctcatagtgttgggcctggcctggggtgcaggcgggacagttgttctggcagccatcctcacacaggtagtccccatcatccagcttccagctacttgcgaactccacagcgtcaggagccagagccccgtcaggcgtgaggaagtcgtctgctgggtcaccattatagttgccacacagcccgcacacctggtcttggaagcgtgcaggcaggctgagtgccagctggcagtcccagtcataagtgaccaccagcccaaagaccagctccaccacggcccgtggtccgctctggtacacacgcaggcgaccctcactcagggagactggcaggcgcgagcgctggttgtcaacctgcagagtgggtgaagaggaggtggtcaggcccctgtgccatctggcctccagccctcattaaagtactttttaattaaaagttttaaataggagaatatagaaaaagagtatgtgctcaaacgtcactgactcaagccttccctgactgccctattttatgattttattttatggtttgtttgttttgttttgttttatagagatgaggtcttgctatgttgcccaggctgatctcaactcctggcctcaagcaatcctcctgcctcagcctcccaaagtgctagaattacaggcatgacccatgggacccagcctacacccctttttaaatggcagccttgggccgggcgcagtgactcacacctgtaatcccagcactttggaaggctgaggcgggtggatcactttatgtcaggagtttgagaccagcctggtcaacatggtgaaaccctgtctctactaaaaataaaaaaattagctgggtgtggtggggcacgcctgtaatcccagctactcagttggctggggcaggagaattgctttaacccaggaggtggaggctgcagtgagccaagatcgtgccaaacagagtgagactctgtctaaaaaaaaaaaaaaggcagcctctccctattccatagcctccttccctgctttccttttttttctatagcatctggccttctgaaatataattcacaaattgaccatgtttatcatctgtcttactccatcagaatggcagctccacaaagacaagggtttgggtctgctttgatcactgctttatccccagtgcatagaacagggcctggtagaatcccaggcactcactaagtgaattaagtcactgctgcatttaataaacattcactgggcactcactctgtgcctggccttgagctgggagatcctgggaatacgaaggtggcggagacagccccaagccctaccctcatggggctcccagtccattgggagaaacagacacatcaccagacagtgagagctcagaggggtcagggcagagatgggagaagcacaggcagaaaagtcaaggccaggatcagaaaggcccaggcagaggggtcaaggatgggataggggaggtacaggctgagggttcagagctgggatagtggggagataggaggctgtgaaaacctagaaaaatggccagatctaaccttgctggtcagggatgttgaaatcttaacacccaacatgatggtattaagagtggggggaggcctttgggaggtgattaggtcatgagggtggcaccctcatgaatgggattagtgcccttatgacagaggcctcagagagctctcagatccgctttccaccgtgtgaggatacaaggagaagtaggccatctgcaacctggaagagcaccctcacctgaacctggcagtgctggtgacctcatcttggacttccagcctccagaacacagagacgaggttgtgttgtttataagcctcccaggctctggagaagcctgaagtctgactaagaaccaggagataagaactatgtctctctgtgccctggggcatcttttttttgagatggaatcttgctctgtcaccaaggctgggctgcattggcacgatctcggttcactgcaacctctgtctcccaggttcaagtgattctcccacctgggattacaggtgcctgctaccacgtccagctaatttttgtatttttagtagagatagggtttcaccatgttggccagactggtcttgaactcctgacctcaagtgatctgcccacccctgctcagcctcccaaagtgctgggattacaggcatgagccaccgtacccagccttttttttttttaattaataaaaaaattttttaaattagatatgggggtctcactatgttgtccaggctggtctggagctcatggctcaagcaatcctcccacctcggcctcccaaagtgctgggattataggtgtgagccaccgcacccagcctgggcatctctttcttactctttccttacacattctctgagctgtgccagagctgagacttgaagtggagaagtcttagccaagaggatggaatatgataaaaggagcaacaggagagaggacagcatgagcaatggcccagaaggaagacagagcattcactcattccggctcccagcaaagcttctgtgagtcccactgtgtggcctgctctgtgccagctggtgctttagacactgcagtgatggagacaggccatggccccatgctcagagctctcagtccagcatggctgctcaaatctgtttctcccctaagtccagtgatctccattttaatttttctatttttttatttatgtatttttttgagacagttttgctctgtcacccagcctggagtgtagtggcagcatcatagctcactgcagcctcgacctcctgggctcaagccatcttcctgcctcagcctcccaagtagctgggaccataggcaggcgccaccacacccagctattttttttttttttttttggtagagatagggtctccctatgttgcccaggctggtctcaaatttctgggctcaagtaatcttccagcttcagcctcccaaagtactgggatcacaggcgtaagctaccatgcccagccaatctccatttttaaatgacacaaataatattcgttcattacagaaaactgaaaatgcacaggagcaaaaatgagaaaagaaaatcaccctgtaggcagacacatacaaatgtatagatcctgttgagttttttcctacctttagatatatttacacttaaaaaaaaaaagaccatgctgaagtcactatttcattaactcctctcctaacaatgtcttgtgagtatcctactatgattctgacagtagctctgcacctttgtcaagtcactgacctctgtgaggatctgacggaaaaaaaaatgaaaggccgggtgcggtggctcatgcctgtaatcccaacactttgggaagccgagttgggcggatcacaaggtcaggagatcaagaccatcctggctaacacaatgaaaccccagctctactaaaaatacaaaaaattagccgggcgtggtggcatgtgcctgtagtcccagctactcgggaagctgaggcaggagaatcgtttgaacccaggaggcggaggttgcagtgagccgagatcacgtcactgtactccagcctgggcaacagagcgagactccgtctcaaaaaaaataaaaagtagttttcagagagaggtataaaattctgtatataatttcaagggatctgaagtccgcctgaacttgtgctcaacccctccagggctgaagaacacctcctttcaccaactgattattaatcgcagagatctacctgcacactcacaaaatcagggaggtacaagaatatttatttcaggtcagatacaggggcttacgcctctaatcccagaactttgggaggccaaggtgggaggatcacttgagaccaggagttcgagactagcctgggcaacatagcaagaccttatctctactaaaaataaaaatacttagcccagtatagtggcatgagactgtagtcccagctacttggaaggccaaggctggaggattgcttgagcccaggagtttgaggttgaagtgagctataatcacaccactgcacttcagcctgggcaacagggcaagaccttgtctcaaaaaaaaaaaaatcaaaaaaatattcattgcagtattgtttgtaatagtgaacaatgtgtccatccacaggggactggttgaatgaaccatggtgttcatatccatataaagaattgtgcagatgttaaaaaaaaatagaggctgatagagaaactgttgatagagaaactgtttcagaatgtattgctaaatgcaaaaagcaaagtagagaacacaacatatatatacacatatacatgtatatatgtgtgtgtatatatgtatatatatatatatacacatatatactctctctctctatatatatatatattttatttatttatttttttttttgagacagagtcttactctgtcacccaggctggagtgcagtggtgcaatcttggctcactacaacctctgcctcctaggttcaagcgattctcctgcctcagcctcccgtgtagctggaattacaggcatgcgccaccacgcccagctaatttttgtactcttactaaagatggggtttcaccatgttgaccaggctggtctctaactcctgacctcaagtgatccacccacctaggcctcccaaagtgctgggattataggcatgagccactgcgcctggccctgaagttattgaacaggcaaaactaatctatgctggaaaaaaaaaatcagaattgtgatcatctccaggagtaggttggggactgtttggtaaggcacatgagggaattttcccaggtgataaaaatattctgtatcttaatgggcaatttggttacacatttgccaaaggtgaactatacagttaagatttgtgatttttgttatatataaatttcacctccaaaatcagccaaaagaagtgtgaaaatattatattctagttaatgacatggtgaagtcttttgggtgatatgtactcatgtctggaactttgaagtgcataaaaaataagagagattgtggaatggacagagggatgaaccgatggatcagtgtgtgatcaatcaagaagagtacagtgtttagaatctagatgattggcacctgtaatctcagcactttgggaggctgaggcaggccgatcagttgaggccaggagttccagaccagcctggccaacatggtgaaacccctctctacaaaaatacaaaaattagctgggcatggcggcacatgcctgtcatcccagctactcgggaggctgaggcaggagaatcgcttgaacctgatcctgccgctgcactccatcctgggtgacacagcaagactctatctcaaaaaaaaaaaaaaaaaagaaagaaagaaagaaagaaaactctaggcgattggcatatgagcattcactgtataagaatttcaactttggacattttaatattttcataataacatggcgagaaaaaggaagtaattgctctaggctgctgttattcatatgaactgaatagaaatgcatttaccagagtcaggacagctgagggattaagaacaaggactccagagccagcatgcctgtgcccttagctccacctcttactagctctgagccctggggaagtcactagcctatctcaacctcagtttcccaatctgaacatgttcataataataatgcctcctgcactgagtttgtgagcattaaattcgttaagatgagaaaagtgctaagaaacatatctggtgcatagcaggtgctcattaaatttagttatttggtcaacgtaaatcccccattgctggataattttttgtttgtttgtttttgttttatgctattataaaccatgttggcatgttaccccccagtctctgtctctgaatatcctttaaatttctagacgtgggatggctggagggcagggttctaaggtcctgctactgattttcaaatccgcctccccaccctccaactccatggcccacttccctgcaccctggtttgaggtcggccattgggctttgcctccgccttcggacccgcagctcatggatgttaaccccccaaagcccccaggtactcaccaggacgaagccaacttcaccgcgggtcagcgacacagagtggctgtaggcgcgcacagtgacgaggcccacgtaggagacgcggcggctgccccggtgctcgttcttggcctccacgctgaaggcgggcagggtgtcgtcctcgctgcacagctccaccatcgtgtacgaacaggtgcccatcatgtcgtagcgacggccgtcgaaggtggtgtaatgggggtcgccctgggcgcggcagacagcggtggactccgccacacacccggccttcccgcctaccacctggcagcgctgcccggctgcgcactgcatgccttcgcaggagggctccactggggacagtacagctggggagggaagggaacggtgaaaagagagaatcagaagtgtccgcggggttgtaatcccagcacattgggaggccaaggtgaggggggcggatcacttgaggtcaggagttcgagaccagcctgcccaacatagtgaaaccccatctccattaaaaacacaaaaattagcagagcatggtggcacatgcctgtaatcccagctacttgggaggctgaggcaggagagtctcttgaccccaggaggcgaaggttgcagtgagctgagatggcaccactgcactccagcctgggtgacaaagtgagactctgtctcacaaagaaaaaaagaagaaagaagaggaagaagaagaagaaagaagaaagaagaagaagaagaagaagaagaagaagaagaagaagaagagggaagggggaggaggaggaagaggaggaggaggaggagggaagaagaaggaagaaggaagaaaccgcctcaggcctcagagggaggcatcctggagcccaccttgccggggaagcttgagcaattcgctcacaactgcccatttttgcccatttttgcccattttaaaggtggggaaaccgaggtctggaaccccacagggagagagttgctcaggcctctctgagagccccatgttttctgattctccagtttaacacagggcagcctagaagaagggaaggcagtaaataagaaaaggcagaaacggtcattaaaatgttaatttgtgtttttctctcccccttttcccctcttccctaccttccctccagggtcaaaaagagctaagggatttttttaaggacagaaaatggaagacagccttcagcaggatgaaaaggactatggagtcaggccgcctaggtaggaatcctggctcaaccaactggctctgagacactgggcaagtggttttaaactccctctgcctcagtttcctcatttgtaacatgggggtgataataatacctccttcgtagggatcttggtggggggtgttaggattaaataagctaaaactcgagaaagctttagaactgaacctacgtgttaagtggagtgttacccattataattaatcacccaccgctccctcattctatttctcaagcccaaagtggctccttgaagttgggtggcttccatgccttggaggggaggggaggggcatttttgccaggtccaggaatgccagagtcttagcgtggcagggactacatgggaagaaacagctttcctccatctgcctcccagtcctcaaaagtttttgcagctgggtgtggtggctcaggcctgtaattccagccctttgagaggctgaggcaggaggatcgcttgagcccaggaatttgagaccagcctgggcaacatggaaagaccctatctctacaaaatataaattaaaaattagctgggtgtggtggtgcatgcctatagtctcagctacttgggaggctgagggaggattgctttagtccaagagttcgaggctacggtgagctgtgatcacaccaccgcactccagcccgagtgacagagtgacaccctgtctctaaaacaaagttttgagggagaaacagttatccccattttacagatgtggaaactgaagcccagagagatgaagtcacttgtccaagatcacacagcagagctgggatttgaaccctgggaccctgcactacactgacagcgtctcatgggctgagcctgaggtcacacaaactgccaggtcatatacattaactgtgtcaaaaacacgtgaaacacctagaaagattgcaagatactcccctccccaacgcgtagtcatcttattatcatacatttagatctcctaagtttgggtatcaacattcctacatgaggtgtggagagtggcttagcaactggtgtggctatgtcagttgctaaaatatcaaaatatttccaaactggttggtgagaagctgctgacctgactgtcccccacaaccccaaagatccctccttctcagcaccctggctctcccctagggccctttccagaacaaaccaacagacaggggctgatgccagcatgatgggggcttcaggaccctgtcacagtgctttggctgctgtctcttctgactggtagtgccccagctctccctggttgctaaatatttagaatattgtttctgggcggatgggaggggctgagaagacttgaggaaggatgtcgcggagaagagaagtgaggggaggacaatcaggatcccgaaagccacagaggagtaggtgggtggaaaagcggtcaccaggtggacaggaccaggggacatttccattacttactccggccgcaatcagcagctgttgcgtagcctatagccttggccagcccgaaggtgagcagtcccaagttggtggtggcctcggccgtgtggatcatgtcagctgtgccgagctccacttcagcatacgagaactcactgcctggcacagcctcccaggtgagcttggcccccactgcatgcccatctatggtcagcccgctgatagccttcgtctgtgccactaccagggccacgccctcacagcctggtacactcttgaccacataggctgggcagtaggccgccacatctgggatcaggaccaggtaggggtcataagtcacttcattccttatggcacctgtgccaaacaacaggacctggatgcccacatttgcagacaggtagagtggccaggatggccggacctcaaactctaccacatcacctgcctggagcccacgggagccagtgatacccccatggttgtaggtcagctttgtggcctggctggccacaacgaaggccaaatcatagcgagattgggaggccagcgtgggtactacatagtgggtgccccaggcagacgtgggtagcagctgctcaaccacatggttgcaggtcgtatgtttctgcgcacagctgtggccagagaggacagccacggggctactagctgtgacctttgaccccgagagatccactgagctctgtagctgggccacattgtagggctgtagagtcactcttaggacatcgcctgctggatagaacttgccattgaatgtcactgaccccttcagcgtgacactgaccgaggcacctgcggcaccggccaccacggcaaactccttgacattcctggctgaggtgccggggggtgtgagcacaaaatactcggtgcctagggcctggatgggccgcagcagtgtcagctccgctgtgtcaggcttggcatttagtgcctgcacagagatggcatagtcagaatggatcaccaccgcatgctggaagatcttgctgcctatcatctcagccttggcactgatgttgaccatgaccgactccccgggcctcactgtgaccttctttgaggtgttgtctgcctggctgaggatggagactgaagcggggctctctgacagactggagataaggaggcgggggtaggccttgctgtaggccagctgatagttctgcaggaaggctgtgaggaattcctctctgccagtgttcttgaggtccactgaagcctcctgggtcaatcctggttgagaaaatacagttgtgggtccacttatccaatcctccccacttttgctctgcacccagaaacatgttgaagtattaacttgggctttcccccaccacccttctctttcctttcttctgattcatgcagctttcgtctacaagccttcctggcttttgtttttcaaaaatctaaacaccttagacagggccctcaaactccaatgctgatggggccaggcaagaaatataaatgtgtgaaacagtcccggaggggcgactgtggaactgaagcactcctataccatctaaagtgggttgttgcttatgcaaatccatcagtgtgatacatcttatcaacagaataaaggacaaaaactatgtgatcacttcaattgatgccagaaaagcatttgataaaatttaacatcctttcgtgataaaaactctcaagaaagtagacacggaaggaacacaccccaacatgatgaaatccatgtacaacagacccacagctggtatcatactgaatggggaaaaactgaaagcctttgctctaagatctggaacacagcaaggatgtccactttcaccactattcttcaacatattattgttagtcctagctaaaccacttagacaatagaaaaaaataaagggcatccaaactggaaaaagggcattcaaattatctttgtttgcagatgatataatcttatatttagaaaaacctgaagacagctgggcttggtagctcacgcctataatcccagcactttaggaggccgaggtgggtggatcacctgaggtcaggagttcaagaccagcctggccaacatggcgaaacccaatctctactaaaaaaaaaccaaacattagctgggtatagttgcacatgcctgtagtcccagctactcgggaggctggggcaagagaatctcttgaacccaggaggtggaggttgcagtgagccaagatcacaccaccacactccagcctggatgacagagcaagactctgtctcaaaaaaaaaaacaactttggctgggtgcagtggctcaagcctgtaatcccaccactttgggaggctgagctgcacagatgaagaggtcaagagattgagaccatcctgaccaacgtggtaaaacctgtctctattaaaaatacaaaaaaataattagcctggcatggtggcagacacctgtaatcccagctactcgggaggttgaggcaggagaatcgcttgaacctgggaggcagagatggtagtgagctgagatggcaccgagctgagatggcaccattgcactccagcctgggcaacgagagcaaaactccatctcaaaaaacaaaaaacaaaaaacaaaacaaaaaaaacagaaaacctaaagacttcatcaagaagctattagaactgataaacaaattcactaaacttgcaggatacaaaatcaacatacaaaaatcagtagcatttctatatgcttacagcaaacaatctgaaaaaaaaaaaggaaagtaatcccatttacaatagccacaaataaaataaaacacctaggaataaacgaaagaaatgaaagatctctacaatgaaaactataaaacagtaatgaaagaaatggaggaggacacacaccaaaaaaaatggaaagatattccatgttcatggattggaagacacaatattgttaaaatgtccatactaaccaaagcaatctaccgattcaatgcaatctctataaaaataccagtgacattcttcacagaaatagaagactaatcccaaaatttgtgtggaaacacaaaatacccagaatagctaacgccatcctgagcataaagaacaaaactggaggaatcacattacctgacttcacattatactacaaaactataataaccaaaacagtgtggtactggcataaaaacaaacacatggaccagtggaacagaacatagaacccagaaacaaatccacccacctacagtgaattcatttttgacaaagatcccaagaacatacattgcatttattgaagataaatggtactgggaaaactggatatccatatgcaaagagtgaaactagacccctatctctcaccacatacaaaaatcaaatcagaatggattaaagacttaaatctaagacctcagactacgaaactactacaagaagacatttgggaaactctccagttcattagtctgggcaaaaatttattaagtaatacatcaaaagcacaggcaaccaaagaaaaatggacaaatgggatcacatcaacctaaaaagcttctgctcagcaaaggaaacaatccacaaagtgaagacacaactgacagaataagagaaaatatatacaacccatcttagctaaagcaattagacaagagaaagaaataaaggcatccaaactggaaaaaaaaaaaaaagaagtcaaattatccttgtttgcagatgatataatctgatatttaaaaaaaacctaaagacgccatcaaaaagctattagaactgataaacaaattcactaaatttgcaggatacaaaatcaacatacaaaaatcagtagcatttctagatggtactgacaagggattaataaccagaatataaaaggagctcaaacaactcaataggaaaaaaatcaaataatctgatttgtgtgtgtgtgtgtgtgtgtgtgtgtgtgtatgtgtgtgtgtttgagatggggtcttactctgtcaccccaggccggactgcagtggcacgatctcagctaactgcaacctccgcctcctgggttcaagtgattctcttgcctcagccttccaagtagctgggattacaggcatgcgccaccatgctcggctaatttttgtacttttagtagagacagggtttccccatgctggccaggttggtctcgaactcctgacctcaagtgatccgcctgcctcggcctcccaaagtgctgggattagagacgtgagccaccacgcccggattaatctgattttaaaatgggcaaaagatctgaatagacatttctcaaagaagacatacacatggccagcaggtatatcaaaaaatgctcaacatcactaatcatcagagaaacacaaattaaaaccacagtgagatatcatctcactcgagttaaaatggcttttatcctaatgaaaggcagtaatgaatgctgctgagcatgtggagaaaagggaaccctgttaccctgttggtgggaatgtaaatcagtacaatcactatcgataataatatgaaggtttctcagaaaactaaaactagaactactgtatgatccagcaattcctttccttccaagtcaggaagtcagtatatgtaagagacatctgctctcccatgtttattgcagcactattcctaatagccaagatacggaatcaacctaagtgtccatcaacagatgagtggataaaggaaatttggtacatacaaacaatggagaattatccaccataaaaaagaatgagatcacccggcacagtggctcacacctataatcccagcactttgggaggccaaggcaggtggatcacttgaggtcaggagttcaagacgagcctggccaacatggtgaaaccctgtctctaccaaaactacaaaaattagccaggaatggtggcatgtacctgtaatcccagctactcgggaggctgaggcacgagaatcacttgaacctgggaggcggaggttgcagtgagccaagatcgcgccactgtactccagcctgggcaacagagtgagactcggtctcaaaaaaaaaaaaaaaaaaggaatgagatcctgtcatttgcaacaacatggatggaactggaggacatgatgttaagtgaaataagccagtatagaaagacaaatttcacatgttctcactcatagatgggaatttaaaatttttaactgatgaactcatagaaatagagagtaaaatgatggttacgatgattaccacaggctggaaagtgtagcggggactgggggataagtagatatggttaatgggtacaaaaatacagttaaacagttagataaaatagataaaatctagtatttggtagcagaacaggatgactattgttgacgataatttatggtatattttaaaataactgagagtggaattggaatgttcctaacacaaagaaatgacaaatgcttgaagtgagggatgccctagttaccctgattttatcattacacactgtatgcctgtatcaaaatatcacaggtaccccataaatgcaaacccataaaaattaaaaattttaaaaatatataaactagtaaaaaaaaaaaaagtggattgttggtactagctttcacctgttataatgaaagaatgtgagcttttttaaattgtaagaccttcctgtttttctttttttttttcttctgagatggagtctcgctctgtcacccaggctggagtgcagtggcacgatctcggctcaccacaacctctgcctctcaggttcgagtgattctaccacctcagcctcccgagtactgggactacaggtgtgcgccaccaggcacagttaacttttgtattttttcttttttttcttttgaaatggagtctcactctgttacccaggctggagtgcagtggcgcgatcctgggtcactgcaacctctgcctcccggtttccacgcccagctaatttctgtatttttagtagagatggggtttcaccctgttggccaggctggtctcaaattcctgacctcaggtgatccacctgcctcggtctcccaaagtgctgggattacaggcgtaagccaccacgcctggccgttctttctgtttttaaagagaatgtggctatctgaattttcatgtgaaatctccaacccacaattgttttaagcactttggggctcaaggtggatgtactctgctgccagtgtatgatttccatctttttacaaactggagtgcagtggcttaaacacaacacactgcagcctcaacctcctgggctcaagggatcctcctgtctcagcttctggtatagctgggaccacaggcacgcactgtgtgcctggctcattttttaatttttttctagaggcagggtctcactttgttgcccaagctggtcttgaactcctgggctcaagtgatcctcctgcatcagcctcccgaagtgctgggattacagacgtgaccaactgtacccagctggtttttgtcttaataggacttgtgggggccaggcgcggtggctcttgcctgtaatcccagcactttgggaagccaacgcgggtggatcacttgaggtcgggagttcatgagcagactgaccaacgtggtgaaattccatctctactaaaaatgcaaaattagccggacatggtggcatggggcgcctgtaatcccagctactagggaggctgaggcaggagaatcgcttgaacccaggaggtggaggttgcaattagctgagatcacaccattgcactccagtctaggcaacaagagtgaaactccatctcaaataataataataataataataataataataataataatgggacttgggggtttgtgaaaaggggataaagagaagaaggggattatggaagggtgaatgaattgtctcctagaaatagatggcagtgggggcttctgaccacccccaactaggaagagcgtccctggggctgaggagagagaggtctaaggaatcttgaagagagtgtgggggctatggaatgaccaccttccatataaagggggctttgaaggatatcccagggggccaggggatcaggaacaatggacatttcaaaagtaacctagatggatgctgactggtgacgagagggtcctcatatcccatcctccccccagtactttggctttatccaaaattttagttctggacacatccctgggagaagtggggacaacaccctccaagaatgactttcgtgaaattttccatcaacttagcagaatgaggctcagagtcaaaaccttagttgagttgcagaaaaccaagaaagttcttgcacacttgagtttggggactaaggtttttgcctgtgctcccatccagaaaagggtgagaattggtgaattctaccacatccccctgcagagcctaagggcctctctcctgtctcagctagcctggggtgacatgtggaggaggcacacatggaaggcgtggacccacgcagagttccccagattggaacaaggacatggagagggtcttggtctgacttaccccacaggagggttgctccagcccagagtatccaccagctccatagggcacccatggctgcagtaggaaaagagaaaggatcatagaaggctgatccaccgcctctgctggagactgtcctgggcagaagggcccactctcatgacaagggccacctgggaccatgaaggctgaggtggggaaagaagtcgggcagattgggccagggggtatggatccaaggaccagtgtgtgtgtataggggaggctggctgtccagcgggtctggaggtgggttggggagggcagaagccagggacggggtggagagttggctgtcttgtgggtctaggggtaggatgaggaggcctacagtcaggggcaagagtaggggacctgctgtcccacttccaaaggggaccccagcccttctcacctgcaggtccctggagctgcagggccagccctgtggcagggctatatagtggagtttctgggccacaccctgggccacgtgccaggcagatgatgccaacttcctggaggaggctgccatcctcatggccagatgaaatgggaaactgtgaaggcctgggaaggagggacagtgattctggatgcctgggttccaagaagggagtgaggacagctggtggccattccctggaagccttctggagagtttggtcctggaagggtggggtccctgagggagacagctggggagcaggcagatgagcacctgggtccctgggtggaggtggggtagggtgggggtgtgggcagtgagggtgggaggtggcatgtggtcatatttgctggcttagtggctaggttccttcctttggctcctgccaggaacaacagtgagggacccatatccgggtcctggttccttctcagtccccacaggctggggagtccctagccacccacatcctgcttccagacaccactaggggcaggtgtctgggatgggcaggagtctgaggctatggagtgggacacaagacctccaccgcagcccagtggggcgtctgcggtttctcatctgcaaaatgggaacaccaaaaccagcctctctgggcatctttacgtcccagagatgtaaaaaaattctcaaggactgtagagctggggggcagcctcctctggtgtgggcgcaggccaggctgcaggtgggcactgggactgaggcggtgtgtgaagaagggacaatggcctctgtttcctggttccacacagacacccagattctacttctgatcccagacacctgctcctcagtggtgctggaaacaggatataggtggccagggactccccagcctgtgaggactgaggaagagccaggacctgttggttttggagtttttttgtgtgtagggagggtttgctcttagcaggggctagctgaacaggtttaggggactctgtgcctctccatcaccccagaatttgcctgagatgggaggtggaggtctaggttgcacacaaggagcagaagaatgagctgaaagttgggctttctcagctggagtcagctcctctgaggggctggcctgacccatgccctgcctgccttctccctgactcaggatctcattgtttgctgggggagtctcccctgggaccagcagctgcaaagcctgggtgctctcttggaccaacaccctagcagctgctgcccctggggctcctcctctcttatcacagcagcctgggcctctgggaggccagagcgggtggggggcttctctctccctggagctccaaccaatccccacgcccacccaagaaacgttcctggagggaaagataaaggctaagagttgactgggacataaagtcaaccaggagaatgaggtgagtaaataggagactggctaaaagccagagataacaagaaacaagcaggggcaggggacccacaggaagtggaagctttgggaaaaggatgcctgggtccctgaggggtctaaaagttggtggaaggggctgctgggtccctgagacagagaaggactcggaggaggagacgtcgggattcctaggaggaaacagcaattgcaaaccaagatgtgaaaattctctgtctgaggccaggcgcagtggctcagcttataattccagcattttgggaggctgaggcaggaggattgcttaaggccatgagtttgagaccagcctggttcaagaccaacatagtgagaccctgtatctacaaaaaaatacaaaaattagccaggcacggtggtgcacgcttgtagtcccagctacttgggaggctgaggcaggaggatcacttgaggccacaaggtcaagaccagcctgggcaacatagtgagaccctttctctacaaaaaatataaaaataaaccgagtgtggtggcatgcacctgtagtctccaccattcaggaggctaaggtgggaggattgcttgatcctaggagtctgaggctgcagcgagccgtgatcatgccactgcattctggcctggggagaaaaagaaaaaagaaaataaaatcctctgtgtgccatatgcctcttgtaattagaggcactcagagacaaatgggaggtgaagggaaagaatcagggtgagtttcatgggtgtttctggccctcaattctctctaagccttggggtttcccctggttgatcacagaaagaagcttcctgccttcaaaattcatcatcgctctccacagccagagtccccagaaatggggtggttgtggtgggagatctcacaaattaatactctgtatgtgccaatccccttgggtcttctttctcactccttttaaggcccaagtggtgtgtgtgtgggtgtgtgtgtgggtgtgtgtgtgtgtgtgtgtgtatgtgtgtgtgtacacccctgtgctttaccctgtattatatcaattctcaggaaaccctttggtgacccgggaaataaactctggggacacttccttatggtcagagaaatcgcatccatccctccactggcagccttgctctgagcccaaacaagggtatttgtgtacctgagcctttcggcctcttcctgcttatctgcttccgtctccttgcagcatgggcactggctataccatcccagacccctgggcccctctgactagtcttggctttatagactggagcacagtggaagagaatttactctctccagctaaattcaggcttgcgggcaatttctaacttaattcctttacgctctggatcccacaatccgacttccataagcactgaacgttttgttaaactctccaatgacccattatttgccacttgcctctagttccttccctctaacatttgacattcacacttcctctctgcctataataattgaaattctataggagatgttctctgaccataatggaatcagcttgaaatgaataacagaaaaacaggaaaatctccactcacaaggatattgagcaactcacttctaaataatccatgggccaaagaggaagtatcaaaaatacatagaattaaatgaaaatgaaaagaagatatttcaaaatatgtgggatatagctaaagggaaatttatggcattaaatatttacattaggaaagaggaaagttcttaaaccaatattctaagctcttcttacacaataaagtagtaaaagaccaaaacaaacacaacgcagaagaaaggaaataatgaagagcagaaattaataaaactgaacatgagaaaatcaatgaaacgaaagaactacttctttgttgttgttgttgttgctaacaagagcaagtctttgaatttcccaaatgtatttgtggatttgtctattgttgaatagagcattctataaatatcaattagatcctgttgattgatgctgttattcagttctttgatattctcacatattttatcctggtagttctatcaatttggtgagactgacgtttttaattctccaactatatttgtggacttgtctatttcacctttcagctctatcagtttttgcttcatgtacttgaatctctgttgtttggtacatataccttaggattgcaatgtcttggcagaatgatcctttgtttttagcaatgtttttcgctctgaaggaaagtattttcgtattaatatagtacttccttccttttaaaaatttatatttaaaattatatatatatttatttatttatttatctatttattttttagacagagtctcgctctgttgcccaagctggagtgcaagggcatgatctcggctcactgcagcctctgcctcccaggttcacgcaattctcctgcttcagcctcccaagtagctgggattacaggcacctgtgaccacgcctggctaatttttgtatttttggtagatacggggtttcaccatgttgaccaggctggtcttgaactcctgacctcaagtgatctatctgccttggcctcccaaagtgctgggattacaggggtgagccactgcacccagcctaaaatttatatttataataacataaattaataaaattaatatatatttctattcttttattttcaacctacctatgttgttatatttggagtaaagttttttggagacagtatctagttggatcattttttaaatccactctaccaatctctggccttttatttcatgtaaggagatagactatttacatttaaagtagttattgatatgtttggacttaagattaacattttaatattcattttccatttgttccatttctcattcttattttttcttgcattcctgtgagttacatgagcattttttagcattccattttgattcatattattttcgaatacataatttgtagaattttcttagcacttgctctagtactacaatatacatatgtaactgattataatccaacttatgaatattttaccactttgattgaagtgttgaaactttacatccatatagatccttttaccctcccacttatacatatgcgtgtgtgtgtatacacatataactattttaagtattgtctcttcctatagacatcagataatactataatttttgcttcaaccaactacgatttttaaaaactcatgagaagggtaatctgctatagttatcactatttttgtccattctgctgttcttccttcctttctaaagttctgagccttttcctgtaatcatttggactttggagaacttcctttaatcattctctaaaaataattctgctgacggcaaagtcttgtagtcttccttcatctaaaagctttttatttcttcttcataccccgtagatagttttgctgcatataagattctcggctgggcacagtggctcacgcctgtaatcccagcactttggggtgctgaggcgggcagatcacaaggtcaggagttccagaccagcctggccaacatggtgaaaccctgtctctaataaaagtacaaaaattagccgggcatggtggcgggcgcctgtagtcccagctacttgggaggctgaggcaggagaatcactgggaggtggaggttgcagtgagccaaaagcacaccactgcattccagcctggaggacagagcgagactgtctcaaaaaaaaaaaaaaaaagattctcagcagatagttattttctttcagcacttgaagagtattgctccaggctttcttctccatggtttttgataagaaattttttgtcatttgatcagtgttccctatagacaatttataattcctctctagctgcttccaagatagtttcattgtttgcctttgttttcataagttagttatactgtgttttggcatggaatccgtcagatttattctgtttagcttcttgcatctgtaggtttatgtcttttgccaaatttgggaaggtttggtcattattcttcaaatatttttcagccccactttcttttctccttctgttaatctgataatacaaatgttagctattttataattgtcctgcaggttctctgagcccttgttagtcattttctgtttctcttttttaaagttgattgtctctctgttttttggattgggtaatttttattgttctatcttcaagttcacttcttatttcctttgtcatagttgctctgctcttgagcctttccagtgagtttttattttagttattgtatttttcagttttatcattttcatttgattctttaagaacatactttccatttctttggtgagattttcttttctttcccatctttgcaaggaatttctacttgcttggtgaaacatttttatgatggctactttagatctttgtcagataattctaaaatctttcatctcagtgttagattgttgattggcttttctcattcaagttgtgatttttctggttgttcatattatgtatgatttttaaattatatcctggacatttctggtattatgagaggagaccctggatcctatttaactcttccattttagcagtcactgtttttaggttagcatgcaggtcctggcctacttttgtgtgctatgattccaatgacaatttagttttcagagcccttgcattattattccggtctatttcatttgcctggtgctggttgagctcatacccaattcctgttagtaccaccaatggaggttaaaagcattttcttggggcctgcttggtgctgctacgttaggagtaggagacactggcacaaaagggtggagagtacttccctgggctgcgtggtgccagcagggctcttccttcatctctgccatccactagggtggggaaagcacctacctgggtgctttctgccgctggatagggggctggggagatgctggatctagaccacgtcctgtcgttgggtgggaaattgagagatgctgggccactgagatgtttctcgagttctaaggcccttgtcagttttccttctttttatctttcagagtcctcttaagaatgtctgttatgttattccagggtttttagcagagaggagccaggaaaaataaatctatgtcatcttgacagagatgttaccatcatcctggcttgttgtagtctcctaagatagaaatcaagtgagattaccagacacagtattaaagagaaaaaaaaaaaaaagtttgtttccgtttgtgcagaagggaggtcagcaccgtgaaaggaaaagggtaggctgctccccacagggagcaagtcgatctgtcttgtaggggtccagatgccatgatgtgcctgtcatcatgtgttaacaagggatttcttggcgcctgcacaatggttcaacatggtttttcatacattgcatgtaatattggcattttaaatctctacctctgagcatgatttttagcattgaaataaggaaattatcactgtaagttgaaacctaagctgttcctgtggcttcctggggaagtccctaagcccctaaagcaggaacttgtggttaatagcttcttgggcctctgatgctgactggctggaggttaggtatagaacaggaattaaaagaaataaagaatgtgtaagcaaaacttagttgtatgtaagaaaacccaattccccctgaggaagagaaagagctggagtcctttaaaattaactgcctgtttttctatggctagtgagccttatctctccctttcccaggcattgtgaagactctgtttctctagctgtgcagctgtaagatcactagacagataatctcaagtcgtaaaacatgctgttccttgaaaaaaaaatgatataatgcatgtctcaattgaatgactgtctttgtttctcacttctgtgatatgcttccccctgcacagatctcccccagccccacgaaatgcttaaaaggtagcttgactctttgttcagggctcagtcctttggatgttaatctgactgggtcggtgcacctgaataattaaataattcctcctcaaccccacggtctctctgattccttaattatcctgctgcagacaagctacagcttgagtaaggggcttttgttctttttcactaaaccacctcaaaataggaagccagccagctgtctcactcccagccaagagatttcattctccttattctttttttttttttttttttttttagaccaggagaaataactttatttgaataggacccgagacagcatattgggctaaggaggagaggtaaggttccaaaaccgcagtcaaagctcatcaaccaaatggactctacttcccagcaaccttgcagttagtgcaaccaacaaaaggcctgctggggaatgtatttgccactaaatcccccaagtatgccaacattacaaaaaagatagaggtttttcatcataattgaatttccacaaacctccccaatcacaagtattataagtggaagtaaaaaatcacattttacagatctcaaacttgtcttcaacatttagttcatcatcttcaaaaaatagctcccctgcctaattcattagctatatgatctctccaagcagcaacaagatggccaggccatggcaatcctcttcctatttcccctagccactcagggctcaacagcagggtgaggctcaggtggaggtagggggtggggagcacaagggctacattcccccagtacaacgtggcatctgaagcttgatgggagagcagaactggtgggacttgagggaagggtccagggcctgtattcagtcagaatcactgctggaagaggaggaggaagaggaggaatgcttgtcatgcttgtggtacttgtggtgcttttggtgcttgtgcatctttttatgagctttcttcattttcttctgcatcttcttgtccactatcactgctggtccaaccatgccaggagccaagggattcacaggagggattccaggggcaggcggtgggtatggaggagggtagggacccaacggttggcatcctggataccctggctgtggcacaggatgagggggcccacctggggggaaagctggattgccatggggagctcctgggggaggaggacaggggcctgggggaaagggtggattaataggtggtgggtgggcaggattggaacctccagggcacccaatattggggggatatggatttggccctggctgcccggcattgggattccacatgtttaggtgtgtcctccagcctttccaccgccgcctgggcttgctgcgttctccttcgcagtcctcattctccttattcttaaggagcaaaggtctcttctggaactacttcctgctaagcatggacatagtctctacatctatttccaggaggagtagaaatttcttatggcttgctgaaggggctgatacggctctgggctagtggtctctgaaacaggctggaagcctggcaagaccatttacttggcatgaaagcattacagtctgaaagacgtgaattttaccagcaggttaaacaagcatggtttaaaaattaaaaatttaaagattaaaaactttaaatattaaaagaagaaagatagccaataagggcttaagaaagggaggaaccaagttacaagccttacaagggtaaggttcatctgacagcattgtacactaagttgacttcctttatcaaaagagtgtaaccaatttcctgattgtaaattgcctgggtgttaacctctactcgcccagtagtatttatccaagtgcagcaggaggtatggtgactgtacaaacatcttcctgttcagctaataagtaacctagaagtcttgcacaatgattaacttgacatgaaactattgtagtctgaaagacacaaattttaccagcaggttaaagaagcatggtttaaagattaaaagaagaaagatagctaataagggcttaagaaaggaaggaaccaagttatggagggtaaggcccaagttatggagggtaaggcctagcagttgtccaacaccacattagcaagagaattgagggaggtttttagcctttccagggcctgcctcacctggtccactatatgcctagggctattgtgactccaggtaccctgcacccagactaaaaggaagaggttacagtgagatagaaggtacagtggctgggcgcggcggctcacgcctgtaatcccagcactttgggaggccgaggcgggtggatcacaaggtcaggagatcaagaccatcctggctaacacggtgaaacccccatctctaaaatacaaaaaattagccaggcatggtagcatgcacctgtagtcccagctacttaggaggctgaggcaggagaatcccttgaacccaggaggtggaggttgcagtgagccgagatcgtgccactgccctccaacctggacaacagagtgagactccgtttaaaaaaaaaaaaaaggaagagggtacagtgggagcatgattcatgccaggccctcaccatgtcttgagtatgacctgtgcacctaatagggaaatgatcccaaactatcttacccagctggggtaatattttattattatattgtctgctaaattttccccaagttgataatgtattttaaagcctgatttaagtcttcatctattagaaagtttgtcttgagaaaggactgctccaataggtcattttaaaagggctgagctttaagttcccctttggggtggatcttattcttagtaaggcaatagggaggcacttaatccatgatttctgggcttcttggcatagtgtagccaaggttctttttaagggtttgattcattctctcaactttcccagaagattgaggatgccaggcagagtgaagtttgtattggatgctaagactgctagacagccctttggtgacctaggtgataaaagacagcctgttgtcactttgtagggaggctggaagcccaaacctaggaattccttgtttaagcagccatttactttttgtttgtctggtttggtttggtttttaattttttttttgacagagtctcgttcttgttgcccaggttggaatgcagtggcacgatctcagttcactgcaacctccacctccagggtttaggtaattctcctgcctcagccttcttagtagctgggattacaggtgccctgtgccaccatgcccagctaatttttgtattttttttttttgagacggagtctcgttctgtcacccaggctggagtgcagtggtgcgatctcggctccctgcaagctccgcctcccgggttcacgccattctcctgcctcagcctcccgagtagttgggactacaggcgcctgccaccatgcccggctaattttttgtatttttagtagagatggggtttcaccgtgttaaccaggatggtctcgatctcctgattgtgatctgcccgtctcagcctcccaaagtgcagggattacaggtgtgagccaccgcacctggccttaatttttgtatttttagtagatggggtttcactatgttggtcaggctggtctcaaactcctggcctcaggtgatccgcccacctcagcctcccaaactgctgggattacaggcgtgagccactgcacccggcctttaagcagtcatttacaaacttcaattgctttttctgtttgtgtggggaaagcttccacccagcctgcgaaagtgtctataaaaatcagaatatatttgaattcccctttaggggtatctgtgtaattcgccaatcttctccaggataggtcttcttatgctgcactggggcagagccagtggatgggctcaggaattatttctaagacaaatttcacatgcttgagttacagagtccactgtggcttttttatttttattttttgagactgagtctcactctgtcacccaggctggagtgcagtggcatgatctttgctcaccgcggcctctgcctctcaggttcaagcaatgctcctgcttcagcctcctgagtagctgggattacaggcatgcgccaccacacccagctaatttttatatttttagtagagacgggatttcactaagttggccaggctggtctcgaactcctgacctcaggtaatccacccacctcagcctcccaaactgctgggcttacaggtgtgagccactgcacctggcccactgtggctttttctttctttcttttttttttttttgacaaggtctcgctttgtcacccaggctggagtgcaattgtgcaatcttgactcactgctgcctcaaactcctgggctcgagcaatcctcccacctcagcttcccaagtagttagtaccacagatgcattccaccatgcccagataatttttaaaaatgcttttgtagagacacagtcttatcgtgttgcccaggctggtcctgatctcctgggctcaagcaatcctcctgcctcagcctcctcaaatgctgggattactggtgtgaaccaccatgcctgttaggctgtagcttttaaagccttgctcactaggagattttggattaaattccatagtgagtctctctcataatgagtttcctcatgaagtcttttgatgactttccattggtcagcttctggtaggaaaaggcattgttgctgatcttctagccaccctgaccatttaaattataccctccttcatctgctcagtttttttttttttgatggagtctcgctctgttgcccaggctggagtgcaatggtgccatctcagctcatggcaatctctccctcctgggttcaagcgattctcctgcctcagcctcccaagtagctgggactacaggcatgcaccaccacgcccagctaatttttgtgtattttagtagagacagggtttcaccatgttggccaggctggtctcgaactcctgaccttaggtgatcctcccaccttggcctcccaaggtgctgggattacaggcatgagccatcactcctggccaaccactgccaacttctttttttttttttttttttttgagatggagtctcgctctgtcccctaggctggagtgctgtggtgcggtttcagctcactctaagctccacctcccgggttcacgccattctcctgcctcagcctcccaagtagctgggactacaggcgcctgccaccatgcccagctaattttttgtgttttcagtagagacggggtttcaccatgttagccaggatggtcttgatctcttgacctcgtgatccgcctgcctcggcctcccaaagtgctgggattacaggaatgagctaacgcgcccggcccagctgcccgtttggcagctctatcagcctggttgtttccttggctgattaaagaattgtctttttgatgccctttataggacataacagctatttgggcagggagcttaatatggtttggctctgtgtccccacccaaatctcatctcgaattgtaatcccctcatgtcaagggaagtacttggtgggaggtgactggatcacgggggcagtttccccaatgctgttttcacaatagtacgtgagttctcatgagatctgatagcttaaaagtgtgtggcttccttcactcactctcctgctgccatgcaagatgtgccttgcttccccttcaccttccgccatgattgtaagtttcctgaagcctcccagccatgcagaactgtgagtcaattaaactttctttgtttataaattacccagtctcaggtatgtgtttatagcagtgtaagaacagactaacatagagatgaactgcctcaaggaggaataaaatcgcttcattgggttttgtcggggtgctcctggcagttagcattctcctctttccagacagctgcatgagtatggagcattaggaatccatacttagaatcagtatatatattaagtctcttcccttcttcaagctgaagagcccttaactaaggcttggagctctgcttcctgagctgaagtgcttaggggaagttattttgcctctctggtccagcgtaggctgacaatagcatgttttgccttccgggctccattttatttgtttgtttgtttgtttttttagatggagtctcgctctgtcacccaggctggagtgcaatggcgtgatcttggctcactgcaacctccgcctcccaggttcaagcgattctcctgtctcagcctcctgagtagctgggatgacaggcgcatcacgagcccaggacttcgagaccagcctgggcaacatggtgaaacctgtctctgctaaaatacaaaaaattagctgggtgtggtggcgtgccaccatgcctggcctgcaggctctattttctacaaaacaacccccatctgtaaaccattcttcatctggattctctcaaggggtctcccgtaaatctatccaactagaatagatctgctccaaagtttccacataggtgtgttccagtgtccccaaggtgggcaagggaaggagggtggcagcattcaaggactcatatatctttaaggtcaagtctggggtgtctaacagtggggcttgattttgagttaaccttccccgagttagccagtggctccctttgatttccaacacattctggacctggtaaggagtataaacttcaagggattggcctagcatgagtttggagatatccctgaccaggaggctggtggctgccactgccctaagacagccaggccacacctgggctactgggtccagttgatttaaaaaataagtcactggcctttggacaggccctagcttctgaattaggacttccagggctttgcccagagaggtggaggctatctggaaaccccgggggtagcactgtccaagtacagtggggagcttcctgagtctctggatccttccattcaaaggcaaaaatgtaggtggagtcaggatgcagcatatattaaagaaaacatcctttagatccagtacagtgtaaaactgtgtgcacccagggatttgagagtggagtgtgtatgaattagggactgaaggatgtgtgggaacaactgagtcattcactactctaaagtgtggaagaaactggtattctacatttggtttcttcacaggcaggactggagtattacaaggggactgcagggctgaattagtctgttctgtatcaatgtttccaggaggggccatatcccttgtagggcttctggcctcaaatggtattttggcttgcgtgggtagggtaggcctggcttaagctttattttaatattctcctcattgatgacctgtcctgaaatgttggtatcccatacagacttttccactcaaatcaatatcttttctaggactgggggtagcttctgatcttggggaaccaaaagggccagtaaatggattcctttctcaggaggcactgagacttgtatggcattcccctggagggaaactgaggctcccaacttagataataagtcatgaaccattaaaggaaggggacactcagggacatataggaaggaatgagtgatagccttagatccaattttacaagtcaaaggaaaggtaaactgtcttaccttgggttgtccatctgttcccgtcactgtacaactggcgctgaacagagatccatcaggatgggtcaggacagagtagggggctctggtatccataaggaattcagtttcctacctgccatattgagggtgacccaaggctccacagtggtgatggtgatggaactcttcaggactggaggcagataagcatttgagaacacctcattcagagggggtagcctttttatttgagaggccagcaacaagaggagtgggctggggaggtctactccatcctggcttcccagaaaagaatggacagtcctttctccagtgcctcttcttacagtaagcacactggttgcaccccatttccatggacattgggtggggtttaatccccacccccccgcattcaggtttctctgttacctaaggtcacctcaaggtgggcctatgattatagcagccaaaatgtgtgtcttcctttttattctctcatttttctacaccttctctgcctggtcccagttgttaaaaatgttgaagacctctgctaccaacgttgcttgaagggtctaagggtcagctttcagcttttgaaggttttcccaaatgtctggcacagcgtgggttataaaatgcatggccagaagtgttaggccttcattggtccttgggtctatgttactatactttctaaaagcctcagagagcctattaaggtacccagctggattttcatccacttcctgagcaattattttactttattatactttactggttttgtctgacaccctctgatatgcaattaaggaagtgattgatccttaaccagtccctgtcatccgtataaacccattgcgggttctgctctgggactgcctcaccagatacccagtaaatgacatggccaggattatatctggccatctcctctgcatatttcttaccctttccaagattcgagttttttcaccaggagtacaacaacgagttaggactacaagaacatcttgtcaagtcaaaggaaaggttagactaaacttaataaattcatcactaaacctatctggattgttcaagaaccggccaaaccaatccttgccttgatttatgtctgacattggtaagggtccatgtacctgagttgcccctctagttccatccgttacctcccagggggaaagcagccctggtatggtggggaagtgaaggagggtgctgacttggagcccagttggagccacactggggacagcactgagggttgttgaggagtagaaggggaaagccttcctgacccagcatggtatggaggaggctccagacagaaggagaaaggatccacagtagcagagaggcctgcttcccaccctgcccttagaaaggtagtgagagaattgagccctaggggttaaaatctgagacaggacttggctcatctctcagctgttgcttgagaggtaccatataaacctggcaggagtcctagagtttgagatccagatataatttcctgaaggcctgcatgtatggaatctcaagctatttattagaattttttacagtatatatccaattggaaaatgatgttgtaactgaaggaccccattctcaggtcatttctcttggtaccccaggggatactgaggccaagcaacatcacagagaaacacgagcttctttttctttgtaatatctcatttaaactgatcccaattacagaggatgcatccaagggggggaatcttttgggacgtctgtagtgtttcccatggtagagctggtgtcctgtaatcaagaggtctggtgagggatgcagcctctgactctgacagtcttcacaattgcagcacacatcctggtctgactcatcccagaccttcaaatccctggcaagaactaagcaagccaaagaggacagagggaggagagcagaacgagggggcttgagagcctttagctcttggatttgccagcttcaacccacaaagtctagcaagtagtagattttacatcagctccaagtagaacttactctacacccacatttatttacatggactctaacaagaaacgagatgatgtactagacagaggaaaaatttcatctggcctaatgagtaaggcttccttccaagaatcctggagggtggcttcacccatgcaacaaggaccagaaacaagaacgcatttccattcagacaactgacaaaacagattataaacgtccaggctccacaaagaagaatacggtcagggaaaatactgagtggtttcagtatttgaaacaaaagagaattccagattgccggctggtacctagcccacacatgtctggggcagttccctagaccaatctcagaagggccagccagaatcactccaactgcctacgcaagtttcccagaagggctaactggaatcaccccaacttcccacccaaatttccaaaaataagggagagaaggagagacaaaagaaagaaagaggcccttatcaatgtcagacataagtcaaggcaaggattggtttggccggttcttgaacaatccagataggtttagtgattaatgtattaagtttagtctaacatttcctttgacttgacaagatgttctagtagtcctcactcattgtactcctggtgaaagtttcaaatcttggaaagggtaagaaatacgcagaggagatggccagatataatcctggccatgccatttactgggcatctggtgagagagagagagagagagagagagagagagagaagaagaagagcagactcacctagggtccagacttgactctccaaagcaccaacaccaaagcaatggtccagagtggccacctttgttaccacctggtcagttgcctctgtcctccaggaagtcttgctaactcctgtggggacctaaaatgagggtcccatctggggtaccaggagatgttacaatcatccttggttcttgtagtcttccaggatagaaatcaagtgagattgctgggtgtggtggctcacccctgtaatcccagcactttgggaggctgaggcaggtggattgcttgagcccaggagttcaagaccagcctgggcaacatggtgaaaacccatttctactaaaaatacgaaaaaaaacagctgggtgtggtggtgcacacctgtaatcccagctacttgggaggctgaggcaggagaattgcttgaacctggaaggcagaagttgcagtgagctgagattgtgccattgcactccagcctgggcgacaaaacaagactccatctcaaaaaaaaaaaaaaaaagaaagaaaaagagaatgtttattttagcttgtgcacaagaaaggtcagcactgcaaaaggaaaagggtgggctgcaccccaaagggagcaggttgatctgtcttataggggcctagctgctgtgacgtgcctgtcattgaatgtttaggagggatttctttggtgcctgcacagtggttcaacacgctttttcatacattgtatataacattagcattttaaatcacctctgggcatgatttttagcattaaaataaggaaaagttgaaacaagcctagctgtacttgcaggtccctggggaagtccctaggcccctaaagcaggaacttgtggttactagcttcttgggcctttgatgctgattggctggagattaggtaagctacatcttgagtaaggggcttttcttctttttctctggaccacatcaaaacaggaagtcagccagcttgcctgtcacaaaaccaggagtcaataaataaaatgatttattatttgaataatgtatttgtaggttcttttgggttctctacacatacaatcatattgcttatgaattagtttaattccttccattctcatctttataacttttctttaggctttccaatagataattgaataaaagatatgatgggggcatcctagtcttgcttctgatcacaaagaaaatactttccattggtttttgttgttgtttgagagggagtctcgctctgtcacgcaggctggagttcagcggcacaatctaagctcactgcaacctttgcctcctgggctcaagcgatccttccatcttagcctcccaagtagtagggactacaggcacatgccaccacgcccagctgatttttgtatttttctgtaaagatggggtttttgctcaggctggtctcgaactcctgggctccagtgatccacctccctcagcctcccaaagtgctgggattacacgcatcagccactacacccagcctgttttcaatattttgctattaagtatgatgcttaccgtagcatttttgaaagtatacattattgtattaaagaagtttccttctacttttaattgtttaatcataaatagatgtttaactttatcaaatgatttttctgcatctgtctcaatgatattaatatccattgttgatcattaccttgatgtagagttgctaactaagatacaagacctccagttcaatttgaatttcaggtgacaattaatttttagtataaatatgtcccatgccatttattggctaaatctggaaacctgtctagttccattatttcaccagggctttgcaaaatggggatttttaatgtattattttctcttcatttattaactacaatgctattatacaaagaagcatcccctcattaattctctggttaccctaaattgtagttaatacagaaaaagcaacttaaatgcttcaattttcagttttagtacattctctctaaaggtaaccaaaacgtgtgtgtgcgtgtgtgtgtgtgtgtgtgtgtgtgtgtgtgtgtatgtaatatccttatgaatgcatggatttttaacatttgaagtggtcaaaccttagaccagtgggagctgtcttggtttatggtacatttcctacccagaaccacaatcatccatttctaaaagagccacaattcctatgattaccaaattgtatttatttatttattttgagacaaagtcctgctctgttgctgaggctggagtacagtggcatgatcatggctcactgcagccttgacctcctgggctcaagtgatcctcctgcctcagcctcccaagtagctgagactacagacgtgcatcactacacccagctaatttttaaattgtttgtagagacaaggtctccctatgttacccaggctgctctcaaactcctggattcaagtgatcctcctgacttggactctcaaagtgctgggattataagtgtgagccacgtgcctggccccaaattgaatttagacactataatttgagcactaggggaggaactgcctttaatatttttaattttgtaaaacatttgcacagttccagagccaaaacttgacaataagttatcttcacagagctttagctgccatccctgtcctctccacatttcctcccttctcctgtgagtaaccatttttatgggattttcattcaactttccatcatttctctttgaaaatatagggaaagacatacatatacaagtgtgcgtgtctgtgcatttccctttccttcttttgcaaaaggtagcatattatagcatatcatacacattgtgttttcttctttttgttttgttttgttttgtttttatgagaccaagtctcactcggccgcccaggctggagcgcagtgtcacgatctcacctcactaacctccacctcccaagttcaagcgattctcctgcttcagccactcaagtatctgggattacaggtgtgtgccaccatgcccggctaatttttgtattttttagtagagacgggtttcaccatgttggccaggctggtcttgaactcccgacctcaggtgatcctcccacctcagcctcccgaactattgagatcacagaagtgagccactgcgcccagctcacactgttctttattttactttttttacttgacttttttttttttgagacggagtttcactcttgttgtccaggctggaatacaatggcacgatcttggctcaccgcaacctctgcctcctgggttcaagcaattctcctgcctcagcctcccgagtagctgagattacaggcatgtgccatcacgcccggctaattttgcatttttagtagaaatggagtttctccatgttggtcaggatggttttgaactcctgacctcaggtgatccgcccacctcagcctcccaaagcgctgggattacaggcatgagccactgtgcctggcccatgagccaccacgccaggcaggcacgtactatttttcattcccactagcaatgtgagagtgccaattttcccacaaccttggcaagagtatgttatcaatctgataggtgagaaatggtatctcgatacagttttatgttgcatttgtagtatcatgagataaatcatttgttcatttaagggtttgcattttctatgaattctgttcttttgttttcttaccttgttgtgtttttgtcatgcataaaattgtaattattatgtagtcaaatgtatcagtcctttcttttattgcttctgtaatttgaatcaggtagcaaaaaaaattgaccactgccaggttataaagaaattcattggccgggcacagtggctcatgcttgtaatcccagcactttgggaggtcaaggcaggaggattgcttgagcccaggagttcgagaccagcctgggtaaaattgggaagttctatctctaccaaagaattacaaaaattagccagttgtgcaggtgtgtgcctgtagtcccagctattcaggaggctgaggtaggagaattgcttgaaccaaaggggcagaggttgcaatgagccgagatcatgccactgcactccagcctggacagtagagccagaccctgtctcaacttaaaacctaaatgaataaattcattcacatttagtagttacagggtttcacattttaaaatttagatctctgaccttttcacatttgtcctgctgtgtggtttgaggaatgggtttaattttatattcttccatagagttgtcagcttactccagtatcactgattaaaaagtccttcttgtctccaatgatttgagatgcaacctttatcatatactaaatatctatatgcatttgggtctgctctggattctctattctgttccttcattctgtggtattcatgtgctaataccacactgttttcattagaggttttctgttttaatatctagtcaggtcggccaggcgcggtggctcatgcctgtaatcccagcactttgggaggctgaggcatgtggatcacgaggtcaggacctcaagaccagtctggccaacatggtgaaaccccgtgtctactaaaaatacaaaaattagctgggcatggtggcacgcatctgtaatcccagctgctcgggattacaaaaaacaagaacagctaagaaagttctgaaaaactcaggaggctgaggcaagagaatcacttgaacccaggaggcagaggttgcagtgagctgagattgtgccactgcactctaggctagcgatatatatatatatatgtgtagtcaggtcagtggtgcctccctactctggtctttttcagaattttcttagctgttcttgtttttctcattctcccaaataagttttacaataacttctctaattctagataaaaacctgatgatatttttggagggattgcattacatttttaaactaactttttgagagatatttttattatgtgagtctcctatccaaaaccattgcccttccatctatatatgttcatgtttacctttgtgaataatagaaaagcagacactattcacgtttatctttaaaaaaaaaaaaaaaaaaaaaagcaaaataggccgggtgtggtggctcacgcctgtaatcccagaactttgggaggctgaggcaggagaattacttgagtccaggagttcaagaccagcctaggcaacatggtgaaaccccatctctacaaaaaatcagctaggcatggtggtgtgcacctgtagttccagctactcggaaggctgaggtggtgtcaggcctctgagcctaagctaagccatcgcatcctctgtgacttgcacgtataagcccagatggcctgaaataactgaagaatcacaaaagaagtgaaaatgtcctgccccgccttaactgatggcattccaccacaaaagaagtgaaaatggctggtccttgccttaagtgatgacattaccttgtgaaagtccttttcctggctcatcctggctcaaaaagctcccccactgagcaccttgcgacccccactcctgcctgccagagaacaaaacccctttgactgtaattttcctttacctacccaaatcttataaaatggccccacccctatctccctttgcccccaccctatctcccagagtagggaggcaccactgacctgactacatatatataaatatatatatatatatatatatatatatatatatatatatatcgctagcctggagtgcagtggcacaatctcagctcactgcaacctctgcctcctgggttcaagtgattctcttgcctcagcctcctgagtttttcagaactttcttagctgttcttgttttttgtaatcccgagcagctgggattacagatgcgtgccaccatgcccagctaatttttgtatttttagtagacacggggtttcaccatgttggccagactggtcttgaggtcctgacctcgtgatccacatgcctcagcctcccaaagtgctgggattacaggcatgagccaccgcgcctggccgacctgactagatattaaaacagaaaacctctaatgaaaacagtgtggtattagcacatgaataccacagaatgaaggaacagaatagagaatccagagcagacccaaatgcatatagatatttagtatatgataaaggttgcatctcaaatcattggagacaagaaggctgactctcttttcggactcagcccacctgcacccaggtgattaaaagcttttattctcacacaaagcctgtttagtagtctcttcacacagacatgcatgaaaggtgggaggatcacttgagcctgggaggtggaggttgcagtgagctgagattgtgccactgcacgccagcctgggcaacagagacatcctgtctcaaaaaaaaaaaaaaaacagtaaaattgatatgtatagatttgtgtaaccacctccatgaaggggtaggttgcccctccacacctctgggtgtttctcgttaggtggaatgagagacttggaaaagaaagagacacagagacaaagtacagacaaagaataaagggggcccagggaactggcgttcagcatacggaggctccaccggcctctgggttcccttagtatttattgatcattcttgggtgtttctcggagagggggatgtggcagcgtcataggataatagtggagagaaggtcggcagataaacacttgaacgaaggtctctgcatcgtagacaaggtaaagaattaagtgctgtgctttagatatgtgtacataaaaacatctcaatgccttaaagaacagtattgctgcccgcatgtcccacctccagccctaaggcggttttcccctatcttagtagatggaatatacaatcaggttttacacgagacattccattgcccagggacgggcaggagacagatgccttcctcttgtctcaactgcaaagaggcgttccttcctcttttactaatcctcctcagcacagaccctttacgggtgtcgggctgggggacggtcaggtctttcccttcccacgaggctgtatttcagactatcacatggggagaaaccttggacaatacctggctttcctaggcagaggtccctgcggccttccgcagtgtttgtgtccctgggtacttgagattagggagtggtgatgattcttagggaggatgctgccttcaagcatctgtttaacaaagcacatcctgcacagcccttaatccatttaaccctgagttgacacagcacgtgtttcagggagcacagggttggcggtaaggttacagattacagaacaaaatggagtctcctatgtctacttctttctacacagacacagtaacaatctgatctctctttcttttccccacacctccacaatcaagatacagtttcatcaccccaaaacttctctcatgctgtccttttgtagtatccctccccaccaacccctggaaaccagtgacctcgtctctgttcctttaatcttgtgttttcaagaatgtcatacaaatggaatcagaaagtacgtcacctccagtcctatgtacccatttgactatggaaaatttccactcgaatgtcccacaggtaccttagctcaacctcattgctctccttccaatatgcccctcctcctatgtctagattctagtcaaacactatgccatcatccagcagtccaagctaggagtgtcatcctgggttcctcttttttcctttcacccttctttctaattattcttttttttttttttttttttttttttttgagacagagtttctctcttgttgcccaggctggagtgtaatggcacgatctcggctcaccacaacctctgcctcccgagttcaagtgattctcctgcctcagcctccagagtagctgggattacaggcattcaccaccatgcccagctaattttgtatttttagtagagacggggtttctccatgttggtcaggtggttttgaactcccgacctctggtgatctgcctgcctcggcctcccaaagtgctgggattacaggcatgagccactgcacccggctctaattactctcttaatctcattgcttatatgttctttatatctctcaaaacaatctatttctaaatccacaaccattttacaagtgattctggcaaccacctctcaactggattattccaacagctttctgggtttttttgctgagtcttatccttttgagtctctatctacatcacagtaagcatgatcatcctaaacaaacacaaatcttgttaagtcattcccccaatcccccactccctgccacttaaaacccttcacgggttgtcccttgccctcaggacaaattgtaagctccttaggtgacattcaagacttcctataattcaagccttcctctcctatctcaacccaaaactcctgttctcaccctacatgtctcccacacatactcccacttgggttgcttttttaaagtctggaatgtctttctcctcgcctttgtttttttttctttcttttttttttttttcttttttgagttggagtctcactctgtcacccaggctggagtgcagtggcgcaatctcagctcactgcaacctctgcctcccgggttcaagcaattctcctgcttcagcctcctgagtagctgggattacaggggtgcaccagcatgcccagctaattttctgaatttttagtagagatgggggttttaccatgttggccaggatggtctcgatctcctgacctcgtgatccgctcacctcagcctcccaaaatgctggtattacaggcatgagccaccacgcctggctctcctcacctttcttagctaattagtacttgtccttcaggtctcaccttggctctaacctcctggctggaccaatgctctacctttctaattcctgcaggaaaacactggacttttctctttttccttagtagagaagttttcaaagtgggactgcagacccttgcatgtccctgatcccttcagagggtccctgaggtcaaaactatttttataataatactaagatgttattcaaatttttcactcttaatatttgcactgatagtgcaaaaacaatggtaagtaagactactggcccttgccccaaatcaatttagctaataatcatcagattaatggaatcttcttgttttaatattacaccaaaactctacaagtggaagtatcttaaaggttagttgcaatatggtgtctgaaacgatatcagtgaattatttccatgctattacagtaaaatcccttggtctatattgcactttgcatggatcttttacccattcatagttttatagcatcatgcaacaggaatttggaaaatattggtgcagtgagttatacagctttccaaatgttgaaacatttgttataaaatactgaaaaattatagtcatagatatccacatcattctaatctgaaaggcaataagcatttgggaagctgtcaagctcatggtggcagattaaatatacttccatattaccactacttatatatgtgtggctacattttttttggtatacgttaaccgaaacaaactatcacagcacattgaatgcaaaagcagacattggccaggcgcagtggctcacgcctgtaatcccagcactttgggaggccgaggcaggaggattgcctgaagtcaggagttcaagaccagcccggccaagatggcgaaaccccgtctccactaaaaatacaaaacactagccgggcgcagtggctcgcacctgtaatcccagctacgtgggaggctgaggcaggagaatcacttgaacctgagaggcagaggttgcagcaagccaagatcgtgccattgcactccagcctgggggacagagtgagactctgtctcaaaaaaaaaaaaagcagaaaaaaaagcagacattaagatccagttgttttccatcaagctggacattaaagagatttgcaaaaatgcaaaacaatgctactcttctctgaccataatagaattaaagtagaaatcaattaacagaaagatgtctaggagatgcccaaatatttggaaattaatcactcacttctaaataatccaggagtcaaagaagaagtattaagaagaaatagaaaatatttttcacttaatgaaaataaaatataacaaaatgtatgtaagcaattaaggcagtttttagggggtaaatttatattagcaaacacatatgtcatgaaagaaaatctcaaatctaaccctccacgttaatattgtagaaaaagaaaagtaaatgaaatccaaagcactgaaggaaaaagaaaataaagagcagaaatcaatgaaattaaaaacaggaaaaatcaatgaaaccaaaaattttccttatgaaaggtcaatacaactaataaacctctaaccagacgaaccaagaaaaaaacagagaagacaaaaattacctatattaggaatgatagaagagatatcactacagtatctataaattttacaacttacatgtaatagatcagtcccttgaaagatacaaactaccacaattcaccaaagatgaacaagataaagaggtcttagaactattaaagaaattaaatttatagttaaatatcttcccccgaaaatctctaggcccagttttattggagaatgttatcaagtattattgaaagaaataacatgaattctaaaaaattctctttcagaaaatataagaggagaaatactttccaatttgttttatgaggctagcattgccttgataccagaagccaaagacactacaatgaaagaacactataaatcagtatccctcatattagcaaattgaatctagcaatataaaaaggacaattcatcatggtcaagtagggcttatcctgggaatacaaggtctgttcaaaattttcttgacaaaagtgaacatctagcagggcgtggtggcacacacctgtaatcccagcactttgggaggctgaggcaggcagatcacctgaggtcaggagtttgagaccagcctaactaacattgtgaaaccctgtctctatactaaaaatgcaaaactagccgggtgtggtaggaggcacctgtaatcccagctactcaggaggctgaggcaggagaattgcttgaacctaggaggcgaaggctgcagttagccaagatggcaccactgtactccatcctaggtgacagagcaagggttcatttcaaaaaaaaaaaagtgaacatccattcagggtttaaaaaaaaaaaaccaactcagcaaactaagaagagaaagaaacttccttaatctgctaaaagggcattttgaaagacacttaatgttagaagtctaaatgctttccaccaaagattgagaacaaagaaaagaatgtttgcattcaccactcctagtcaatattgtactgaaagtcctggccgatgtaataagtaggaaaaggaaacaaaagtaatgtcgattgaaaaggaagaaaaataaaactgtctttattcactaatgacatagttgtcacaaaaaaaactccaggaaatctacagaaactcctaaaactaataaatgatttttacaagatcacagaataatgtgcaaaagtcaatcatatttttaagcataaggaaacaaaaatcagaaatttaaaaaattttaataacatttataatatcataaaatatgaaatacatagggataacctgacaaaagatttacaagacctatacactgaaaactaaaaaacattgctggtagaagttaaggaatggctaaataaattgggagattgccgggcgttggtggctcacgcctgtaatcccagcactttgggaggccgaggcaggcggatcacgaggtcaggagatcgagaccatcctggcaaacacggtgaaaccccgtctctactaaaaatacaaaaaattagccaggtgcggtggtgggcgcctgtagtcccagctactcgggaggctgaggcaggagaatggcgtgaacctgggaggcagagcttgcagtgagccgagatagcgccactgcactctggcttgggtgaaagagcgagactccctctcaaaatataaattaaataaataaataaataaataaataaatagggagatataccaggttcatagattataagatttaatgctggccgggtgcggtggctcacgcctgtaatcccagcactttgggaggctcaggttgggggatcacgaggtcaggagatcaagaacatcctagccaacaggcctagccaatatggtgaaaccccgtctctattaaaaatacaaaaattagccgggtgtggtggcgcacgcctatagtctcagctactcgggagcctgaggctggagaatctcttgaaaccgggaggcggaggttgcagtgagccgagattgtgccactgcactccagcctgacaacagagtgagactccatctttaaaaaaaaaaaaaaagaaaaaagaaagaaaattagatcaacagaacagaatcaagagtccacagatagatgtacacacatgcataatcaactgatttttgacaaagctgcagggcatttcagtgggaaaagataatgttttcaataaatggtactggagcgactgggtattcacatgcaaaaagatgaaacttcggccaggcacagtggttcaggcctggaatcccagcactttgggaagccgaggcaggtaggtggatcacctgaggtcaggtgttcgagaccaccctggccaacatggtgaaactccatctctactaaaaatacaaaaattagccgagcgtggtggcaggcacctgtgatcccagccactccagaggctgaaggaggagaatcgcttgaaccttggaggcagaggtgcagtgggctgagatcgcaccactgcactccagcctgggcggccgaatgagactctgtctcaaaaacaacaacaacaaactcgaaatggaacatagatgtaaatgtgaaatatcgagctatcaaacttcttcttcgccccccaaagtgctgggaatacagatgtgagccaccacacccagccaatcgaactatcaaacttctgaagaaaacatttaaaaaaactttgtgagttttcaccaggctaaggtttttaaaaatacaacaccaacagcatgattcataaaagaaaaaattgataaattggacttagaatccacagtggtacatgccaccatgtcaggctaatttttgtatttttaacagagacgggtttcaccatgttggccaggctggtctcaaacttcagacctcaagtgatccacctgcctcagcctcccaaagtactaggattacagatgtgagccattacacccggcctttttttcaaatttctaagaaaagagattttttttttttgagatgggagtcttgctctgtctccaggctggagtgcaatggtgccatcttggctcactgtaacctccgcctcccaggttccagcaattcttctgcctcagcctcccgagtagctgggattacaggcacacgccaccacgcccagctaattttttgtattttttagtagagactgagttttaccatgctggccagactggtctcgaactcccgactgcaggtgatccactcgcctcggcctcctaaaatgctgggattacaggcgtgagccactgcacccggcccaaatcactgtattttggaaaagataagttcaaaaattagccgggcgtggtggcagacacctgtaatcctagctacttgggaggctgaggcaggagaatcactggaacccaggaggcagaggttgcagtgagccaagattgtgctattgccctccagcctgggtgacagagggagactgggtctcaaaaaaaaaaaaaaaaagaaaaaagaaaagaaaagttcattgatcctagcccttgcctctgcccgtgtgtaggaaaatatcgaagaggattaatgattatgtgtcacacccaaaccttgatgggattttgctctcatgtaacttctgagaacatgagctgcagccacctgtataaaaaccgcaggctgaaaccctccggagcagtccaacggttactttgaaagactctcccaggttgtgatcctcagtaagacttctgaatcaaactaactttaattctctaaaagtaggtttttctctttccttttttttttttttttttttttttgagacagggtctctcactctgtcgcccatgctggagtgcagtggcacaatcttggctcactggcagccttgacctcctaggctcaagtgattctcccccctgagcctcctgagtggctggaactacgggcgcacgaccatgctgggttaatttttataaacattttttggtctcactatgttgcccagggtggtcttgagcttctgggctcaagcaaccctcctgcctgcacctcccaaagtgctgagatgattataggagcaggaatgagcacttggcctgatttttgtcttagttgacaatagtcagtgttcaggaaatggttatttatgattattatccataaaaattccaaagggatacactgatttgtcattaccaaaggggccagagagaacctggcaattatttgggcttaggggaataaaggcaaagctctcagatgagtttcagtctgaagcctggaaacagggaggatgggaggccaggggcaagatgatggattccattttaagtaatagattctaagtctcaagtaaaaatcaaggttgccttttgggtgtaaggtagaaacctgggatacagaattaagaattgcccatgttaggcacggtggctcacgcctataatcccatcacttttcgaggcttgggagggtagatcacttgaggttaggcatttgagactagcctggccagcatggcgaaactccgtctctactaaaaatacaaaaaattacccaggtgtggtggcccacgcctgtagtcccagctgctccagaggctgaggcatgagaatcacttgaacctgggaggcagagttgcagtgagccgagactgtgccactgcactccagcctgggcgccagagcaaggctctgtctcaaaaaaaaaaaaaaaacttacagaattaagagttgctcatgcagaggaaaacaaaaagatttattgtcattgtcgttttccttttttttgtggaaacacagacactaggactttaagaaaggcaggagccagatctaatgaatctctgggttctcccagcagagtgatcctccctactcagtgatctccactgagcaggagccaccaattctctttgtaacttaatggaagtggctttcccctgtctgcacctcagtttcatttgtaaaatgaggaaaagcaaacctacctctgagggctgttatgagatcatggtttggaattttcctggccaaaagtgaatgcgcaagtggtgtctcgtgtgacaacccatgatccatccaccaaatagaaaacaatgtccaaacacacaaaatatcaagagtatacatacaaatggtgggagtgtaaattaatacagtctgacagtgtctactaaagctaaacacatacctgccctacgaccagcaattccacacttgggtctattttgtttttgtttttgtttttctttgggagggggatctattttcagaagaaatgaatacgtaagtttgtccaaagaaatgtactagaatattcatagtgagagacaggactagctggatttcctaggccgactaagaatccctaagccaactgggaaggtgaccgcatccacctttaaacaaggggcttgccacttaggtcacacccaaccaatcaggtagtaaagagagctcactaaaatgcgaattaggcaaaaacagaaggtaaagaaatagccaatcatctaacgcctgagagcacagagagagggacaatgatcggcgggatataacccagcactggagcccgcaaggcaatcccctttgggtctcctcccattttatgggagctctgttttcactctattaaaccttgcaactgtacactcttctggtctgtgtttgttatggcttgagctgagctttcgctcactgtccaccgctgctgtctgctgccatggcagctgtggcagacctgccgctgacttccacccctccggatccgggtgtccactgcacttctgatccagcgaggcggcacccattgccgctcccaattgggctagaggctcaccattgttcttgcgcgggctaagtgcccggggttcctcctaatcgagctgaatagagctataacactcaccgcatggcccaagattccattccttggaatccgtgaggccaagaaccccaggtcagagaacaagagacttactgccatcttggaagcggcccaccaccatcttgggagctctaagaacaaggacccccagtaacaatagcactataacacccctaaactggaaaatatccagtctgaggtatagggcatagtcataaaatggaaaccatccagaatgaaaatgaaagaactatttctacacacggtatgcatgaatctcacaaaaacaacattaactaaaagaaaccaaacacagtacacagagtactggtctagagagaaggagaattcaaaacaaacaaaagtaacccagctgttacaagtcagggcgagtccagccaggcacagtggctcatgtctgtaatcccagcactttggaaggctgaagtgggaggatcatctgagtccaggagttcgtgaccagcctgggcaacacagcgaaaccctatctctacaaaaaacattttaaaattagcaaggcgtggtggcacacgcctgtagttccaggtgcttgggaagctgaggtataggattgcttgagtctgggaggttgaacctggagtgagtagtgatctcaccactgcactccagcctgggcaacagagcaagaatctctttcaaaagatatatttttaaaggctacatggggtgggtcatgcctgtaatcccagtgctttcagaggctgaggagagaggatagcttgaggccagcagttggagactctagtgagctatgatcgtgccactgcactccagcctgggcgacagagactctagctcttaaaaaaaaaagaaaaaaacagatgaatgataacctttagaagggatcgggaggccggatgtggtggctcacgcctataatcccagcactttgggaggccaaggcaggcagatcacttgaggtcaggagtttgtgaccggcctggccaacatggtgaaaccctgtctctactaaaaatacaaatattagcctgggcaacagagtgagactccgtctcggggcggggagtggaggggggagaagaagggatgggggaaaggggagcacatgaggcttctactgtttggttttgcgatctggattcaggttgtatgggcatgttcactttgtgtaattttgtcgagctgtaatgatttgtgctcttctctttatttaacttcaataaaaggtttacttaacaaaaattgtagctggtgtgaagggtagcagtgtttccctggggccaagagtacaggctttggggacagacagacctgggtcccaatctatgctttgtcccttcggcacattgttgactgtggctggtggcttcgtggctctgagcttgtctccttctctataaatgaggaaacataatacttgcgacgatgatgcctgtaaagcttaagcgcaggacctggcatagatctgtaaggcggaaacctgggatacagaactaaggtctatggatctcctgtgctacccaacttctgggcactcgctgcctccttttccccagcccagacgcgtgggttctactcgattggttgctcactgcgggctcggggctcctcaatcccggggtaaagcccagtatgaaatgtcaccttcaggggcagctcggatcttcccacgcccgcgcggcgcacaatctttggatcagcgccacgtggagaccttacccgcccgtacgatcaatcccttctgtggaacccagctcaaggaccctccagcccagacactagaaagcgaagagcagttggccgccagactgtccgtgccagagctctgcgaacttactccgttgaaagagcaacggggctgcgccacctcccggagagaacccccagccctccacggcagggcgagatggcgccaccgcgtgatactgcgcacgcccacagctcccgtcccgccctcgcgcctgcgggtacggacagcgcatgagcttatgttgagggcggagcccagaccagcccttcgtcctatcctgcccttccagcacctctcagccgtaacttaaactacacttcccagaagcctcctcagccagggacttccgttgtcgtcagcggaagcggtgacagatcatcccaggccacacagaggccggcttggtcactatggaggagataggcatcttggtggagaaggctcaggtacagtggggacttgggctttttagtccgggccgggctcgcggggagagggtgaagccagacctgagtggggggaggaatggcttccaggaccccggcccaggttggggttattttagaggcctcggtggagagctttgtgccattcgaaggcctgtctgggtggccgagtgatggtaggaggtaaggctcagaaagcggggctgggggagtgagtgacgttagtgggtctttgagacggattgatttcgaaccctggccggtagtgcttagtgaggtcggtggcccggcgttgggattgggtcaggcggtgagtgatatatgggatcccgccgtgcggccgagtgatccccgggtctgggctgcggggctgactgatgttcagggctttgctgatgggggtaatggggcgggtagttaagtattatctgtggcttgcctgagtgatatttaggtctaaggtgagttaggagactgtgacataagggatctttgaggggaaactggggaatgttgggactcgttgaaggcgcagtcactttaacagcctatctaggagagccatgtgacattaggaacctcttgaaggggattgggtggcatttgggtctgataaggagttgatgtgacgtttagatcctagttgggggttgtgtgacactggggacatgttatgagtggtatatgataacataagatctgtttgaggggcaagttgacataaagagcttgtttaggtggccaaaaggtttccaggatctatttagagggtcttaagatatcaggggtctgttaggggctaagtgacatcagggtgaagtggggaggggaacaaacattagtgaagttgggaagctttcatgagaggactgtcttcttccaatgtgagttatcccctttcgtctaggatgagatcccagcactgtccgtgtcccggccccagaccggcctgtccttcctgggccctgagcctgaggacctggaggacctgtacagccgctacaaggtacattcgacccccaacccagaccttgcacaggacctgacatctcatactcttccccactttccaccactctctggatcagcaagtctggagccatccccttctgtcccctctctgctcgcagaagctgcagcaagagctggagttcctggaggtgcaggaggaatacatcaaagatgagcaaaagaacctgaaaaaggaatttctccatgcccaggaggaggtgaagcgaatccaaagcatcccgctggtcatcggacaatttctggaggctgtggatcagaatacagccatcgtgggctctaccacaggtgtgctaaggacacctcattcattcatctgtccacttaacaactatttcctaccatgtgctaggcagcagcaaacaaggcagggcagtgcagtgcaatgttcttcagagtattttgactgatcgaaaggtagaaatacatacatatatatatatatacacatatatatatgtatatctatgttttttttgtttgtttgttttttgttttgagacagagttttgctcttgtccaggctggagtgcaatggcatgatctcggctcactgcaacctccacctcccaggttcacacgattctcctgtctcagcctcccaagtagctgggattacaggcatggaccaccaagtctggctaatttttgtattattagtagagacagggtttcaccatgttggccagtctggtcttgaactcctgacctcaggcgatccacccgcctcaccctccgaaagtgttgggattacaggcctgagccccactgcacctggccagaaatgtattttacattgtgattatctgtatctgtctcttactttttagatagatgtgtaaaacataagtttcaccatgaaatatttagccttactaggtgtggtatatgctgatgttttctatcctattctagtctgttttgctttaaacacagttctggtcatgaccttccaaattgatttcacaactactactggtttggggcctgcagtttgaaacgatgagtaggagtgttaagagattgggctctgaggccaggcatggtgcctcacacgtataatcccagtactttgggagactcaggtgggcagatcacttgaggccagaagtttgagaccaggctgggcaacatggcaaaaccccgtctctactgaaaatataaaaattagctgggtgtggtggcacacacttgccatcccagctacgcaggtggttgaggcacaggatctgttgaacccaggaggtggaggttgcagtgagccgagatcgtgacactgtactacagcctgggtgacagagcaacactctgtctaaaaaaaaaaaaaaaaaaaaaaatactgggccctgatagggactcagagtccttatcagagtatattgtagctgctgctgtttatataggtctaggccttgccctcttgatagtcattgtcactggcatcttatctgttttttcttgtttctgggctctgctcctctggaccaagccatgttcttgtaaaggttttggagaaaggtgtgcgattgtgcctggaattggactggtgggctatgaggaagtgaggagagggtggtatccaggatgaggcctttctctttgacctgtgggagttgggatagtgtggctttccctgagatggcaccatgggtagaggagtaggtttgtgggaagacagggagggcagtccagagcacatgggaggtgtccaggaggctgctggtcagccaggtctgacaatcaggagagagactgagcctggaaacagaagtgtgcctcactagtatgagatgcagggggaggcctgctggacagccagggctggatgtcaagagagaatcagggcggtagacaaggagttcgtgtgaatactggggacggacagcaggagggaaggctggaggccgagaggggacccctcagggtctgaaccagagatgttggggtgtggagattaggagggaggaagggggaaggggcagtttccaggctgacacttctcgttttcctctctcccttctcgcaggctccaactattatgtgcgcatcctgagcaccatcgatcgggagctgctcaagcccaacgcctcagtggccctccacaagcacagcaatgcactggtggacgtgctgccccccgaagccgacagcagcatcatgatgctcacctcaggtaaagggggagcctgcagctgggagggccccatggggaccttgaggacctggccaggagccccagctctgctctcccaccagaccagaagccagatgtgatgtacgcggacatcggaggcatggacatccagaagcaggaggtgcgggaggccgtggagctcccgctcacgcatttcgagctctacaagcaggtgaggcggtgcaggtggcagggaagggagaggccccattgggtctggggttggaggtggaacccctgactcccacttctcttccttcctctgggtttcagatcggcatcgatcccccccgaggcgtcctcatgtatggcccacctggctgtgggaagaccatgttggcaaaggcggtggcacatcacacaacaggtgagccctttcgcccctgccccgagctctcatcttctggcctcttcgccttgctccctgctcgctcactggcactgcacagtaattagaaacagactctggggtcatagcccacgtgtgcatgttactggctgtgctgacttcacctccttgggcctctcctagtagttgaagactcatttcacccggtgatagtgagcagttaatgaaataatgcagtgttttcctacaatgggttgtgacctattagtaattatgaatttcaatttgtgggttgcagccagtattttgaaacatgaaatagaacagaaagcgccagagaacatccacatggtatttataccatggtacaagtatatatggtgcaagttcatctgtttcgtgaaacttgtttcatacagatgtgcacactcatgtatacttgtggttcttcaaaaatatatatatatattttaattcttaaatttttttgtagagatagggtctcactctgttgcccaggctggtcttgaactcctgggctcaagggatcctcccacagtgctgggattacaggcgtgagccatgtgcctggccccaaaaatgtatttcttattgtaggtgccagacaaaaatgtctgaaagtcactcactctataacttttttttttttaaagccctaaaatcttaagcatatgttcagatcttaacacatgtgagccagggagcagtaggaggtagtagttaagcagtatgttttctggggctagactgcctggctttgaaatcttactcccccagcaacttcttatgtgatcctgggtaaattaacctctctgtgactcagtttcctcacctgtcagatggaaacaatcatagtacctatttttctagggtgggtgttcagaagagcaaattgatacaaagcatctggaatgggcaataaatgttagctgttgtcattgttactcatttgcttggtactttattgaacttttactctgtaccaagccttgtgctggaatgcaaagatgacaatcagagatgtcccttgccttgactgggaaaaaagaaaaagacacctagaactcagtcattcagtgactgtttattgaacacccactatgtgccaggatgtgttgtagatgctagagacatgggccaggcgcggtggctcacgcctgtaatcccagcactttgggaggccgaggtgggaggatcacgagatcaggagatcgagaccacagtgaaaccccgtctctattaaaaatacaaaaaaattagccaggtgtggtggcggtcgcctgtagtcccagctacttgggaggctgaggcaggagaatggtgtgaacccaggaggcggagcttgcagtgagcccagatcacgccactgtactccagcctgggcgacaaagcaagactccatctccaaaaaaaatatatatatatatatatatatatattaattagctgggcgtggtggccagcgcctgtagtcccagctactcagcgtgaacccgggaggcggagcttgcagtgagccgagatggcgccactgcacttcagcctgggtgacagagtgagactccgtctcaaaaaaaaaaaaaaaaaaaaaagaatagagacgtggcagtaaacagaacacctccttatggaggtgatgtcttagttggaaatgtggcccgacacagattcgtaaagtttcttttttttttttttgagatggagtcttgctctgtcatccaggctggagtgcagtggtgcgatctcggcttactgcacgctctgcctcccaggttcacaccattctcctgcctcagcctcctgagtagctgagactacaggcacccgccaccacgcccggctaattttttgtattttttagtagagacggggtttcaccgtgttagccaggatggtctagatctcctgacctcatgatccgcccgcctgggccttccaaagtgctgtgattacaggcgtgagccaccgcacccagcccgtaaaccttcttaaaacatgagattttttgtgtgtgatttttttttttttttttttttgagacagagtctcactctgtagcccaggctggagtgcagtggtgctatcttggttcactgcaacctctgccttctgggttcaagcgattctcctacctcagcctcccgagtggctggaattacaggtacatgccaccacatctggctaattttttttgtacttttggtagaaatggggttgcaccatgttggccaggcaggtctcgaactcctggcctcaggtgatccacccaccttggcctcccaaaattctgggattacaggcgtgagccactgcacccggctgtgatttttttttttaagctcatcacctatcattagtgttagtgtattttatgtgtggcccaagacagatcttccagtgtggccctgtgtacccttcacccagattccctaatgttactatcttatgtaaccatagtataattaggaaaaccaggaaattaacagtggtacaatacaatgaactaaagtttagacctccttcaaagtttaccagcttttcccactagagaccctcacttcaggttctgtcgtttttctgagtgaattggggtggtttgtcactggcagagggagggaagagagaaggtgtagaagggatgtagaaatgggaaaagctgctgactggggttgagttttgttttgttttctagagacagggtcatgtctggcaaggcgcggtggctcacggctataatctcagcacttcaggaggccgaggtgggcagatcacgaggtcaggagttcgagaccagcctggcaaacatagtgaaaccccatctctactaaaaatacaaaaaaattagccaggcatggtggtgggcgcctgtaatcccagctactcgggaggctgaggcaggagaattgcttgaacccaggaggccaaggttgcagtgagcgaagatcgcaccattgcactccagcccggccaatagtgcgagattctgtttccaaaaaaaaaaagagagatagggtcttgttctgtcacccaggctggagtgcagtggtgtgatcatagcccactgcaaccttaatctcctgggctcaagcaatcctccccacctgtctctcctaagtaggtgggactacaggcgtgtgccaccatgcccaactaatttttgtatcttcattttcagtagagacagggtcttgctatgttgcccaggctggtcttgaactcctgggctcaagccatcctcctgcctcagctccccaaagtgttgggatcacaggtgtgagcctttttttcctcttgtttttcggggggaattcatctatttgttccggtgacagcacagcttactaagagtgagtaactgaagcaggagcccattccaggataggtggaaggagtagtagagcccagggggagctgagagattgggaggacagggaaggttggggtaggaaggggactgtagtgattgagtaggaaaggctgacggacaggctcggtcagataaggcaattccagggatgggggtttcatgtggaactggttggacatttgcagaacagccaagtaaatggccaaagtcaggtggtcaaggtgtgttttctgtttagagcagaaaaagtcagaaatcttgaggttaggatgctgaatgagcccccagctgatgcaagtatcaagaaagagggaccccttgagccaggtgtaaagtctggatcttagggagtgaacagggcagggctgaagccttgaacagttcctagcttatgacataaaaccactcagtctatctatggactgcatgtctcccttctctggtggctggaaggagagtcctgggggtatgcttcatacaacacaaagcatctgatccttaagaaacaagtgtaactttaagaaacaaggccagggtcaagcatggggtggctcatgtctataatcccagcactttggaaggctaagccaggaggatcgcttgaggccaggagtttgagaccagcctgagcaatatagcaagaccccatctcctcaaaaattttaaaaagctaggtgtggggacatgcctatagtcctagctactcgggaggctgaagagggaggattgcttgagcccaggagattgaggctgcagtaagctatgatgataccactgtactccaagtccaaagggagggcccagaacaaatctgtcttcaaccccattgccaattgtcagttatatcagaacatgcccgtggtccctgatctttttcaggaaattaaaaagctggtccttatagcaaacaggaactcagagctcttggcgaggcagtatgatgtcttagtgtatgggcagcatgcctgttttcttgctgattttgcaagtgctccagaaatgtagactggtttttttctttcttattttagtatttcatatcctgatttttaaatgttgggccaaaaaaatgacacatctggctggacatggtggctcatgcctgtaatcccagaactttgggaggctaaggcgggcagatcacttgaggtcaagagttcaagaccagcttggccaacatggtgaaacctcgtctctactaaaaatacaaaaattagcttggcatggcagtgcacgcctgtaattccagctactcgggaggctgaagcaggagaatcacttgaaccctgaaggcagaagttgtggtgagccgagattgtgctactgcactccagcctgggcgacagagcaagactctgtctccaaaaaaaaaaaaaaagtgacacatttgtaaggatgattcatgatttaggccactgggtcactgtggggtacaagtagatggctattcctcagggctggatgtggggctcacccttgggcatgagggaatgacacaactactaggtatgggtatccaaggaaaaggatgtcttcaaggaattcgcagtttctgttaaagcagaatgggcccctcaggaggctcattcccgcctaactgttgtcatcctgtcatcagctgcattcatccgggtcgtgggctcggagtttgtacagaagtatctgggtgagggcccccgcatggtccgggatgtgttccgcctggccaaggagaatgcacctgccatcatcttcatagacgagattgatgccatcgccaccaagagattcgatgctcagacagggggtaagtgatgctgaaacaaggcccggggtcttggacaggcttgtcgcatgggatgcctgggactgactgtgctgtgcactctcagccgacagggaggttcagaggatcctgctggagctgctgaatcagatggatggatttgatcagaatgtcaatgtcaaggtttggggtttgggatggacaaggggaggtgtggtgtaggaactggggaaagttgggggctggcacctaaggggtggttatcgtgacaggaaggaggtaggagtgcagagatctgagctggcctgccccccaatgtcaggtaatcatggccacaaacagagcagacaccctggatccggccctgctacggccaggacggctggaccgtaaaattgaatttccacttcctgaccgccgccagaagagattgattttctccactatcactagcaagatgaacctctctgaggaggttgacttggaagactgtatcctgctccagaagtcagggaggggccctagttgggaacggggattagatcttcagctcaacttctgccagcaccacagcccagactgtgcaggtgggaccaaggtccagggaggaggggaggtgacagagatggccaaagatgacttccagccccaggcatttaccccatcacacagggaatagtttccttaactcgctgcagatgtggcccggccagataagatttcaggagctgatattaactccatctgtcaggaggtaagtggtggtttctctctggatccaggcagcgggtgtgtgaggacccttcttctctgaaccactctgctgcagtcctgtcccctcatggctgccctgggtcgtgggcgccatctctctcttcctctaccatcactaggggtggatagtacaggggtagtgtttttgtgttttgctttgagacagggactcactctgtcgcccaggctggagtgcagtggggcaatcatgactcactgcagtgatcctcccacctcagcctcccaagtagctgggattacaggcgcccaccaccagtctggctaatttttgtattttttgtagagacagggtttcaccatgttgcccaggctggtctcgaactcttgggctcaagtgatctgtatacctcagcctcccaaagtgtcgggattacaggtgtgagccactgtgccctgccacaggaagtagattttaactctcatccttcaacagagtggaatgttggctgtccgtgaaaaccgctacattgtcctggccaaggacttcgagaaagcatacaagactgtcatcaagaaggacgagcaggagcatgagttttacaagtgacccttcccttccctccaccacaccactcaggggctggggcttctctcgcacccccagcacctctgtcccaaaacctcattcccttttttctttacccaggattggtttcttcaataaatagataagatcgaatccatttaatttcttcttagaagtttaactcctttggagaatgtgggccttgaataggatcctctgggtccctcttaatctgacagatgagcagacgaggtgcatggcctgggttgcagcttgagagaaccaaaatattcaaaccagatgacttccaaaatgtggggaaagggatggaaaatgaacctgagatggagtccttaatcacgggataaagccctgtgcatctccctcatttcctacaggtaaaagacagtaaagaaattcaggtcacaggccttgggagttcataggaaggagatgtccagtgctgtccagtagaactttgcacaatgatggatatgttctgtgttctccagtatggtagctgctcgccacatgtggctaataagtacctgaaatatggctagcatgactgagaaactgaactttttttttttttttttttttttttttttttgagatggagtcttgctctgtcacccaggctggagtgcagtggtgagatcttggctcactgcagcctctgcctcccaggttcaagtgattctcctgcctcagcctcccgagtagctgggaccacaggcatctgccaccacacccggctaaattttgtatttctagtagagacagggtttcactatattggctaggctggtctcgaactcctgacctcaaatgatctgcctgccttggcctccctaagttgttgggattacaggcgtgagccactgtgcctggtcaagaaatggaactcttacacactgctggtgggaatgtgaaatggtaagccacttcggaaaacagtttgacaatttcttatgctaaaaatacacctatcagatgatttagccacttctaggtatttacttaagaaaaaataaggcatacatccatatgaagacttgtaaataaatgttctcattatttttatttgaaatagctaaaactggaaacaacccaaatatccatcagcaagtgaatggataaacaaattgtaatatttgtatgcaatataacaccactcagtaatatgaaaatgaactactgatgtatgcaaaaacgtgaaattcaaaataattatgctgagtgacagaatccagacaacaaataatacataatgtattattctatttacataaagttttagaaaatccaaactaatctaagtaacaaagcataccaatggtatatggggcttggggcaggtgagacggattatagagaaaaaagtaggaggtgatagacatgtttagtttttttgcttgtttgtttttactgtggtaatggtttttcaagtgtgtatgtcaaaacttatcaaattgtacctaatttattgtagttttattgatacctcaataaaattaatagttacatacataaatgtacttgaagttccacctagcacaataaggtaagaaaaaaaattaaggcgtgggactggaaaagaaatgaaactcttcattattcacaaatgtcatgattgcatatatggaaaatctaagtctacacaaaacctattaaaattaaatagtgaatttagcaatgtggctaaacaaaggtcaatataaaatattaaatataagccaggcatggtgacatgcatccacagtcccagctactcaggaggctgaggcaggagaattgcttgagcccgggagttcaagtccagcctgggcaacacagcaagacccactgtctctgaaaaaaaatcaaatacatatatcagcaataaataaataggaaattaaattttaaattataacatttatcaaataaattcttaagtgccaagaataaatttaaaatatgagatataaatagttaaaattacagaatattgacagaaatcaaagaagacaaataaatgttgggatacaacatgttaatgtattggaagattacgagtaaaaatattaattctccacaaattgatctataaacaacgcagcgccaatcagaatcccagcagttttgtcctgctggaaactgacaaactgattctgaaatatataagtaaatgaaaggctcagaaatagccaagagaatatttgaagaaaaaagcaaagctggaagacttacaataccaaatatccagactgatggtaaagctgttgtaactaatgtagtgtggtatggccttaccaatggacaaatcaatggaacaaaatatggagtccaaaaagaaaataatatactcacttgatttctgacaaagttaatcctgtggtacactggagtatgagtgatcttttattaaatgttgccttgtcaactctatgtagataaaataaatctgtgttaccagatgaagagtttttaattgggttgttcaggttattggcatgttgaacaaagaactgaacaaaatgcacagacaaagaaaaagcaacaaaagcagagatttattgaagtgaaagtacactccacagagttagagagggctcaaacaagtggctcaaaagtccagattataatgttccttggggattttattaaactaaaagagcatagtagcacgcctaaacgtcctttagaagcctctaacaggtcatactctataggaatgaagaattctgcccaggaccaatcagaggcaccctgcaaatgagggattcagaatgaaccaatcacaggcattcccattgtgacacaggggaggggaggttcagagaaggagggcctttggcctcgttatttggtcacggagaggtgaggttttcctcttagtccaattccaagaagtcagcaggggttggccttaggttccctgtctccagactctattctcctgcctcatttggacccctacaatctaattgtgaatgtaaaaggtaaaaaaagtttcaaataattacgtagaaggatagcttcatgacctttggtttggcaatattaatcattttttaaaatagtttttttgtttgtttgtttgtttttgaaacagagtctcactctgtggcccaggctggagtgcagtggcgcaatctcggttcactgcaacttccgcctcccaggttcaagcacttctcctgcctcagcctcctaagtagctgggataacaggcgtgtgccaccacacccagctaatttttgtatttttagtagagacggggtttcacctgacctcatgatccgaccaccttgccctcccaaagtgctgggattacaggcataagccactgcacctggctggtggcacacattctttttttttttttttttttaaagacggagtttcactcttgttgcccaggctggagtgcaatggcacgatctcagctcaccacaacctccgcctcctgggttcaagtgattctcctgcctcaacctcccgagtagctgggattacaggcaggcgccaccacgcccaactaattttgtatttttagtagagagagggtttctccatgttggtcaggcctgtctccaactcccaatctcaggtgatccacctgcctcagcctcctgaagtgctgggattacaggcattagccatcgcgcccagccacacattcttatacaaacagttttaacttggttgtaaatatctccactcaaaggatctggcccatgcagaaacacaagacttgtccctcaatataaatcgtaagataggtggtgttttgtacagtctagaaaaccaggccaagttgcagcaaacccctaggttttaatgttaataaagtcctcttggacttcatgggcccaaaagttccagtgttgtattgcttttgtaagaaaatttcaaaactgtaaaaaagacaaatgggtagttcttggaataccaaataagtagtggttaaactggaggtatcagtgcatagctaaggcactaaatttgttataggtcagaatcaactccctaaaatttgatgctcatagccatgaaataaggtggtagagcaatgcaggttccctgatcaaacagcctttcaaaaggagtcttgatcttattcaaagatcatgtcatttaatttgcactatggcctttgccacacataaattatgcagtaattccagtattccactaaaaatccatgacctgaatctcattatgggaatacatcaaactacaaaattgagagacattatataaagtaacaacttttttcttcaaaaatgttgtcataagaaacaaagaaagggtagtaatatcacatgatatcaaagtaggggattcttgctcccttcctcccacaaaagtggacaattagctatccatgaataaaaatagctctaggagagctctggaatccagttaagaagctgcagcaacacagtggagcaaaaaaacacctagaataaccaacataaggggcaggaagaacagtttcatttttaaaaattgaaatcatatcaagtatcttctgagatcacaatagaaaaaaatccctaaaaatcagtaagaagcagaactttggaaactgtataagtacatggaaattaagctcctcaatgaccactgggtcaaggaagaaataaaggaggaagtaaatttcttgaaacaaatgaaaatagaaacacaacataccaaaatgtgcgggatacaggaaaagcagtgctaagaagaaagtttatagcaataaatgcctacatcaaaaaagtagaaaattttaaactatcgaatcatgcaccttaaggaactacagagcaagaacaaaccacacccaaattagtacaaagaaagacataataaagatcagaaaattactaaacaaaatagagactcaaaaaaatacaaaggattaacaaaatgaaaagttggttcttggaaaagataaatagaattaataaaccactagctagactaaccaagaaaaaataaaagaaccaaataaacaaaaccagaagtgtattataactgataccacagaaataccaaagatcatcagagactacagtgaataactatacactaacaaactggaaaacctaggggaaatggataaattcctggatacatataatttactcagattaaatcagggagaaatacaaaacctgaacagaccaataatgtgtaagaccaataatgattcaaatatattgaatcagtaattaaaagtctcccaacaaagaaaaagtccaggacttggtgcttcactgcaaattctaccaaactttcgaagaactaacaccaattctcaaactattcccaaaaattgaagagaagggattctccctagctcattctaagaggccagcattaccttgagaccaaaaccagacaaggatgcaacaactacaaaaaactagaagccaatatccctgatgaacatagatgcaaaaattctcaacaaaatactagccaaatccaacagcacatcagaaaggtaatacaccatgaccaaatgggatttatcccaggaatgcaaggatagttcaacatattcaaatcaataaatgtgatacatcacataacagaatgaaggaaaaaagccatatgatcacctcaatagatttcaaagcacttgatgaaaataaacatcctttcaagataaaaactctcatcaaactaggcatagaaggaacaaacctcaacaaagtaagggccatatatgacaaacccacagctaatatactgaatgaggaaaagccaaaaggctttcctctaagaattggaacaagacaaacatgcccactttcaccactcctattcagcacagtactggaagtcctagccagattaatcaggcaagataaataaataaaagacatccaaattggaaaggagaaaatcaaactgtccctctttaccaatgatatgctcttatttctaggaaaaactaaagaatccacaaaaaactcttagatctgatgtagccaaaaaaccaataggaaagcaatcctgaacaaaaacaacaaagctgaaggcatcacactacctgacttcaaaatatattacaaggctatgataaccaaaacagtatggtgttggtataaaaccagacacacagaccagtggaacagaatagagaacccagaaatgaatctgtgcatttataaccaactgattttcaacaagggcaccaagaacatgtacaggggaaaggataccctcctgaatacatggtgctaggaatattggatatgcatatgcagaagaatgaaattggaccccaatctaccatatacaaaaatcaactgaaaatggattaaatggattaaaaacttaaatggcagacccaaactataaaactatgaagagaaaacaagggaaatacttcaggacattggtctaggcaaaaattttatggcttagaactcaaaagcataggtaacaaaaacaaaaatacacaaatgggactatattatggtaaaaagcttgtgcatcacaaaggaaacaacagagtaaagaggtaacctgttgaatgggagaaaatttttgcaaactattaatctgacaagggactgatatccagaataaaaaaggaacttacacaacagtaaaacaaaacaaaacaacccaaccaaaaaaaatcctattaaaaagcaggcaaagtacatgaatagacatttctcaaaagaagacataaaaatggccaacgggaatagaaaaaaaaaaaagcccaacattaataatcatcaggaaaatgcaaatcaaaaccagaatgagatatcatcttagcccagttagaatgaccattactaaaaagataaaaaataatagatgctgttgaggatgtagagaacagggaattttttttttttttttttgaggcggagtctcactctgtggcccatgctggagtgcagtggcatgatctcagctcactgcaacctctgtctcccatttcaagcaattctcctgtatcagcctctccagtagctgggactacaggtgcacaccaccacgcctggctaatttttgtaattttagtagagacagggtttcaccactcttacacactcttggtggagatttaaattagtacatctcctgtggaaaagaatgtggaaatttttcaaaaaactaaaaactaccatatgatccagcaataccactactgggtatctactcaaaggaaaaaaaatcagtatattaaagggataccttaaatcccatgtttattgcagccctattcacaatagcaaaatatggaatcaccctgcgtccatcaatagatgaatgaataaatgaaatgtgatagccgggcacagctgctcacacctgtaatcccagcactttgggaggccaaggtgggtggatcacaaggtcgggagttcaagaccagcctgaccaatatgttgaaaccccatctctactaaaaatacaaaacttagccgggcgcagtggcaggtgcctgtaatcccagctactcaggaggctgaggcaggagaatcacttgaacctggggggcagaggttgtaatgagccaccactgtactccagcctgggtaacagagggagactctgtctcataaataaataaataaataaaatgtgatatgtatacataatggaatactatttgaccataaaaaagaatgaaataatgttatttgcagcaatgtagagggaactggaggtcattaagtgaaataagccaggcacagaaagacacatatcacatattctcactcacatttgggagatgtaaaaaaaaagtcactcatggaggtatacagtagaacaataatactagatgctaggaggagtgtttgtgaggggatgaagaaagactgggtacacaacacacagttagaaggaataagctctaatgttcaatagcagagtagagagatcacaattaacaatgtatatttcaaaatagctagaagagaggacttgaaatgttcccaatacacataaatgataaatactcgaggtgatggataccccaaataccctgacttgagcatcccacagtctatgaatgtaagaaaatgtcacatctggctggatgcagtggctcatgcctgtaatcccaacactttgggaggctgagcggggaggatcacttgagcccaggagtttgagaccagcctgggcaacaaaatgagacccccgtttctatttacatttttttaaaaagaaaatatcacatgttccccatgaatatgtataaacattatcaatataaaaatatttaaaaaaattttaaagacacataggctaaaagtgaagggatggaagaaattattctatgcaactggtaaccaaagagagcagggtggctataattatatcagacaaaatagactttatgttgaaactgttattagagacagaaaaggtcattatataataataaaagggtctattcaacaggaagacataaagattgtaaatatatacgcacccaacatcagagcactgaaatacataaaacaaatattgacagagctaaagggagaaattgacagcaatgctatcataggaggaaactttaatgcctcaatttcaataatgaatagagcactcaagcagaaaatcaatttttaaaaacccgacttgtgcactctagcctaatggaccccacaaacatatctataactttccacccagcagaagaagaattagcccatgcaacaaattcttttcaaacacacttggaatatcctccaggacagatcacatgttgggtcacaaaacaagtcttaagaatttaagaagattgaaatcataccaattatctcctcagaccatgtggaatcaaactagaaataataacagcaataaataaggaaaatccacaaacacatagtaactaaacaacacacttttgaacaccagttgggtgaaagaggaaatcaaaaaggaatttaaaaaataccttgagacaaatgaaaacaagaatacaacataccaaaatttatgggatgcagcaaaagcagtcctaagagaaatgtttatagggataaatgtctacatttaaaaagaagaaatatctcaaacaacctaagtttacaactcgaggaagtagaaaaaaaaactaaaagcaaagctagcagaaagaaaaaaaataataaagattagaatggaaataaatggaataggctgggcacagtggctcactcctgtaatcccgacagtttgggaggccgaggtgggcagatcacttgaggtcaggagttcaagaccagcccggccaacatggtgaaaccctgtctttactaaaaatacaaaaattagctggttgtggtggtgggcgactgtaatcccagctactcaggaggctgaggaagaactgcttgaacccaggaggtggaggttgcagtgagccaatctcgccatgcactccagcctcagcgatagagcaagactccatctcaaaaaaaaagaaataaaatagagagcagaaaaaccataaagaaaaatcagcaaaactaacagttgtgtttttgttaaagataagcaaaatcaacaatcccttacgtagactaagaaaaaaaatagagaagactcaaagaaaatcagaaatgaaataggagacattaccttgaatgacaaagaaataaaaatgatcataagtgactattataaacaagtatacatcaacaaattagaaaatatagtacagtggcccccaacctttttggcaccagggactggtttcatggaagacaatttttccacagaccagggtgataaggggacaggggaggatggtttcaggatgaaactgttccacctcagatcatcagattctcataaggagcgggcaacctagatcccttgcatgcagagttcactatagggttcatgctcctgagaatctaatgctgccactgatctgacaggaagtggagctcaggcagtaatgttcgctctcctcctgctgtgcagcccagttcctaacaggccatggactggtactggtccatggcccagggattgtgaacccggatataggagaaatagataaattcctagaaacatacaactttccaagatggaatccggaagaaataaaaagtcttacttctcctgggacccctggaatcatggcatattctgaacaaggggagaaacatattgagcagaggctcttagaggagaaaccacctggaatgactcatgagaagatggcatctggagtagaggctattactggcccaatacagaacactgttcactgggacttcccttacaccagcatccagtatgctcccacccccatgcacccttcggaggtgcatgctcagcaaggggtataagagtaccactggcaaaacaatgcttaatccatctggcagtcatcctggccctgtgttttcctacatcagggctaaaggaggccaaggggtggcagagtgtcagaactgattcattattccaaagtgcacttttgcctcactttcgaggcattgagactttgctgtggacagtcttatactgtctcctcgcagggcatggccttctctgtgccttgtccttgttatgcatcctcctgtatccctcacaaaggaagagatggagctgtttgctaatccactttcttcttgagcagttcatgttgtatgaataatagcaaaacctctaggtcacatgtgacttgtttaaatactgtacatacataccttggtgtgtgtgtatatatatatatacacacacacacacacacacacatatatacatatacatatatatatatatatatatatatataaaatacacacttgtacatgaaactcgtagaattcaaaccacatcccatatgggctctgaatatcctaggtagtgcttggtgcaagagagaagtttgttggcatataattcaccttatcacccctgtctctttgtcataattctgctaaattattgagcctccatcacatccagtttcttatggacattctagtctcactcagaactgactcaaagttcgacacacactttttaaaaattcctcctaattgaaactgtatatcctttgaccaacatctctccaaccaacaccacccctgacaggccctggtaaccacaattctacgctctacttctatgagttcaacttttttagattccacatataagtgagattacacagtatttgtctttctatgcctggcttacttcacttaacataatgttctccaggttcatccttgttgcaaacaacatgatttcctcctttttaaagtctgaatactattccattatatatatgccatttcctttctccactcatcctttgatgaacacttagattgcttccacatcttgactattgtgaatagcgctgcattaaacatgggagcatagatatctcttaaacatattgattttatttcctttggatattgatatagtttaaatgtgtgtccctgcccaaatctcatattgaaatgtaatccccaatgttggaggtggggcctggtgggaggtgattggatcatgagggtggagtcctcatgaatgatttagcaccatccctcttagtaccatcctcccaatagtgagttctcatgagatctggttgtttaaaagtgtatagcacctccccctcactctcttgctcccgcttttgacatatgacatgcctactccccctctgccttccactatgactggaaacttcctgaggcctccccagaagcaggtgccattatacttcctgtacagcctgcagaactgtgagccaattaaacctctttacttagaaattgcctagtctcaggtatttctttatagcaattcgagaatggactaacagaaaattggtaccgagaagttgggcattgctgtaaagatgcctgaaaatgtggaagcagctttggaattggataacaggcaaaggttggaagagagttgagtgctcagaagataggaagatgaaggaaagtttggagcttcttagagactggttaaatggttgtgactaaaatgctgatagtgataacggacaatgaagtccaggctgccaaggtctcagatagaaattaggaacttattgggaactggagaaaaggtcccttttgctatgccttagcaaagagcttggctgcattgtgtccacaccctagggatctacggaagtttgaacttgagagtgatgacctagggtatctggcagaagaaatgcctaaataacaaagcattcaagatatggcctggctgcttgtaaccacctatgctaagatgtgggagcaaagaaatgacttaaagctggaacttatatgtaaaaggtaagcagagtgtaaaagtttggaaactttgcactggccatgtggtagaaaagaaaagttcattttcagaagaattcaagaaagtttctgagcaaccatttgctagagaaatttgcctaactaaaaatgaggcaagtgcagatagccaagaaatgggaaacaggcctctaaggcatttcagagatctaagaggcagcccctcccatcacaagccccgaggcctaggaggacagaatggtttcatgggccagaattgacctgtgcagcctcaggacatgtctccctgcatcctggcttctccaactccagctgtgacttaaaagggcccaggtacagctcagactgcagctccaaaggttgcaagccataagtcttggtggtttccacatggtcttaagcctgcaggtgcacagagtgtgaataaggcttgggagcctccatctagatttcagaggatatgtggaaaagccaaggtgtccaggcagaagcctgctgcaggggctaagccttgacagaaaacctctactagagcagtgcaaaaaggaaatgtggggttggaaccctcacacagagtacacactggggcactgactagtggagctatgagaagagggccaccatcttccagatcccagaatggtagatcagagcagcctctgagcctgaacccggcaaagccacaggggaagaaatacccaaggctggaagcccacctcttaaattggtgtgccctggacatgggacatggaatcaaagattattctggagctttaagatgtaatgattgccctactgggttctgatcttgcatagggcctgtagcctctttcttttagccaatttctcccttttggaacaggaatgtctatctaatgcttgtacccccattttatcttggaagtaactaacttgtttttgatcttacaggctcataggaggaaagaacttgccttgtctcagatgagacttcagactttggacttttgagttaatgctggaattagttaagactctgggggactgctgggaaggcaagattgtattttgaaatgtgagaaggccaggagatttgagaggggccagaggcagaatgacattgtttagatgtgtatcccaacccaaatctcatactgaaatgtaatccccaatataagaagtggggactggtgggaggtgattggatcatgggcgcagattcctcatgaatggcttagcagccctttgtttccatcctcataatagtgagttcttatgagatctggacatttaaacgtgtgtaccatctccctcctcactctcttgctcctgctttcaccatgtgatgtgcctgctcccattttgccttccaccatgattggaaacttcctgaggcctgctcaaaagcagatgccactatgcttcccgtacagcctgcagaactgtgagccaattcaacatcttttcttataagttaccgagtctcgggttttctttatagcaatgcaagaatggactgatacggatatatacagatatatacagatatatatagtgggatgactgggtcatatagtggttatatttttaatttgagaaaactccggatattttctatgtttgtactaatttacatttccacaaatagtgtacaagtgttcccttatatccataccctcaccaacccttgtcgtcttttgtctctttgattacagctattctaacactgtgaggtggtatctcagtgtggttttaatttgcatttctctgatgattagtaatgttgagcattttttcatatggacactttttttttttttttttaaagatggagtctcactctgtcacccaggctggagtgcagtggcgcgatctaggctcactgcaaccttcgcctcctgggttcaagcaattctcctgcctcagcctcctgagtggctgggattacaggacccaccacgcaccaccacacccagctaatttttgtatttttttagtagagacagggtttcaccacgttggtcaggctggtctcaaactcctgacctcacgatccgcccacctcggcctcccaaagtgctgggattataggcataagccaccgtgcccagccttatattgacacatttttaagggatttgggggggggcaggggttctttgcaacaatgtaaacatccagtccctcatcaaactttcaattttttttcacgtactaatttatatcagtttggaattatgattccctctgttatttaatgggttttaatctataactagcattatttattttgatgctcaaaccatgtcaagtttggtcagtggaagtcccttcaatctggtttccatgtcctttgaacacgtccccaccattctttgagcactgccttactttcaagcacaagatgttccaagttcattctgaactttcccttccccagctctggaatctgccatttctccatggagccttgctcctttcagtggagcatggtatttaggaaccaagggctgactgcctaatgtgctttccaagtataatttcctcagtccaagcttttcaaattgatctgccaaagacccattgccaaagatccattgccagaatataagagtggaaggaaattcttaatattttttgaaagttactattattttcatttttctctttgtaaaaaattcatttaattcaatataaaaagacaaaaatctttggcacataaatcgcaactctctgatgcaaatgtttaaataaagctgatactccaagaagacgcaacatattctctttatcccacagacatataggcctatggttgcaaacttttatacacacacagagtcacaattccactggcacccgtgatgttccacatccagattttccaaatcacacattctcatcttcacatagccttgccggcaaccacacggcatagtaccacattgttacgtcaagcacagccagtctaccacagagcctgtcgtcccattgaccaaagtcacaaaaatcacagccccgggtatttactgtggttttctccagtcagatcccttcactcactacacactgactcacactcaaattacacacacgcggaaacacaacccgccagagccagagaggttccgtcggtcccgcaaccctcacagtgccacacacacgcgctcacaaggcaaatacaaatggccaggcactcattctttacaatacacatattaagcgcctattatgtactacacgccgggactacctcaagaggtgaaacaaacaaaatcctgcctggcggagctatcgcccagtcccgcacgcactcggcctcagggtcacactcggcggtcccacgctcaagtggcccggccagtggcccagaggcgtctgttctcctcctcagcttcctgcgtgggttcctggtaagtgagtcgaacccgccggatgcgcgcgcgcctgcgcctccgcccaaaaggatcagtttccggctgtggactacatttcccagaagccccttgggcagtgttgcctggaccccaagggccctttacattgcgttcttaacggttcagtcaccttaaccgttattattcacttgcgggcgagaagtccgagctaggtgaggcggaacgggactcttacgagtaggactggggatagaactgccgcccaaagtgaggcgctccagggcccagacctggcgtgtcgtgcccgcagggagcctcaggcctgtgcgtgcttggggagcggagaagggaaattgtgtgacaaaatgtggcagacggtgtatgtgtgtgtgtgcgcgcgacggggcgcctgtcaggaccgggttgggcgggtgtgggtgcgggtgtgaggctgagacaggtgcctggctctctggtgtgtgtcactgaccctctaccctcctcacggcctcggtgtttgcacacagcagtgtccccaagagggaagtcaaatatcgagctctgggatgaaggttcccagcaagaaggtacagacctgggttggcgattggacttttgaattagaagtgtccctaaaacagactcctgggacgacaggttggaagactgcgcagttggagccgctgtgtgggcagctgcatgtttcagaaccactgcattcccatacctttgatctagaaacctggtgtgagttcagagacagatcccagcctcactctcacacagctgttatgtgcgtgaggtcagcacagatgtggcgctggaggggatattctaggtcggtctgtgctcttaagaaaggcctgctgtctcatgattatttttcttcccccattctgctattcatcaaaacagggatcctgaaaaggagggaacaattgttgtagcaggtctaaaagttcaggtccaggtaagtttatatttcctttttattcataaaatggaaatcacacattctaatcctcacacagccttgcctgcacccagtcatacggcgtggtaccacactgctatgtcaagcacagccacaatctaccacagagcctgtcacctcattgctcacagtcacaaaaatcacatccccaggtactttctgtagctttcatttgcatttttccctttgaagaagttcatttgattcaatctaaaaagactaaattatttgtcacataaattgcaactctctggtctatatctttaagtaaatctttaaataaatgcataaaatgtttttgtttttaggaaatggaaacattgctttgcttttcctgaattgtccagtgacctatcccaggccttcctttccagtgaacaatggaccatgcaggtggaccctcctcttcacgggcctccaaatgactttctcatttttcaaatcattcctctgcactcactttctataatggtagagaaatgcatatcctggagtctaaagttaaaactttgttttattgagattaatgtttaggtagaatcacatcatccatcttctccaatcttctccaaagacctcagttttaaaatatgacaggattagagatgacctgactagtgtcagtaagcaagtgataatggtcgcctgcttttaaggcttttagaagtgggaatgtgattggaagtccaagcatagaaatctgtgtgaacatgagcagggatttttttccaaggaatccatgagttgagatttatttttatacagagttagtcataagaataaaaagtacatatgagtaaagtaatagtcatagtgatgaagaataatacgcaatttttttttctttttttgagaaggagtctcgctgtgtcacccaggctggagtgcaatggcatgaactcggcttactgcagcctctgcctcctgggttcaagtgattctcctgcctcagcctcccaggtagctgggattacaggcgcctgccaccatgcctggctaatttttgtatttttagtcgagacagggtttcaccacgttggccacgctggtctggaactcctgacctcaggtgattcacttgccttggcctcccaaagtgctgggattacaggcatgaaccaccgcacccagccgcaaattttaaattttatatgaatctcactaatattaggatttaaagacatttaacaagcattatatctaaattaacatttcaactgattatttgctggagaagtagaggagaaccaaacactcttctgtctgctttgttcaaattttcttattcagtctgcagacactgttcacctggcttgtgtattaagagaagaatcttaacagtgaaaaggtcttgttgaattgaagaagaatgttcaagaactggcaggcatttatttataatggtcatgctgttttcctattgtttgcatacatgtcaaaccaatttgcttctgatgtgttaaaacattttattttataattggatatagatctattgtatacttctggttatagaattaatattcaccttttataaattatttagttactcattatattacataaggcacttataaagaagaaagttaaaatagccccagcatcactattaacactttggggagctatattttagcaagatttttttttttttttgacagagtctcgttctgttgcccaggctggagtgcagtgatgtgatcttggcttactgcaacctccatctcccaggttcaagaaattctcctgcctcagcctcccgagtagctgggattacaggcgcctgctaccacgcccagctaattttttgtatttttaatagagatggggtttcgccatgttggccaagctggtctcaaactcctgacctcaggtgatccacccacctcggcctcccaaagtgctgggattacaggtgtgagccaccatgcccgacctatttcagcaagatttttcagcacacttgtatgtatgtgtgtgtgtatgtgtgtgcgcacagcacctgcacttttcttcctgcagaatagaaattgcactaactgattattcaaaggacacaagactttccagcttctagttagaaaaactaattctccctaaccatagctttcttataactctgtgcacatagggagaagaggaaaacaccaatgaatcctgctaagtttgattaacctttgagaaatttacaccttttagggttatataaaccaatcaaggataattaatatgacataatttatcaagtaagatagttcttcaggattatactctttttttagatttttaaggttgcttttacaggacatagcaatactcttatcttggttaggtttttttcagggttccattatgcaaataacattttctaggacagatttataacagtagaaaacagaataagggtgggcatggtggctcaagcctgtaatcccagcactttgggaggcccaggcaggtggatcacgaggtcaggagttcaagaccagcctggacaagatggtggaaccccatctctactaaaaatacgaaaattagccggctgtggtggcatgcgcttgtaatcccagctgcttgggaggctgaggcagagaattgcttgaacccaggaggttgcagtgagccgagatagcaccactgccctccaggctgggcgacagagtgagactctgtctcaaaaaaaaaaaaaaaaaagaaaaagaaaaagaaaacagaataagatagtaacagctacaaatattcatgtaaatctttccatatagaacaggagaacaagattgaacctcatattaaaattatctattgaatgccttattacagcagttcccaacctttttggcaccaggactggtttcatggaggaccgttttttcacagacagggagagggagatggtttcaggatgattcaagcacattacatttattgtgcattttattcccattattattacattataacacgtaattaaataattatacaactcaccctaatgtggaatcagtgggagacctgagcttgttttcctgcaactagatggtctcatcttggggtgatgggaggcaatgacagatcatcaggcattagattctcataaggagcacgcagcctagatccctcacatggtcagttcataatagggttcgcactcctatgaaaatctaatgctgcagctgatctgacaggaggcagagatcaagcggttaatgctagcaatggggagtagctgtaaatacagatgaagcttcccttgctggcctgctgctcaccttctgctgtgtggcacagttcctaacaggccgtggtccagtgtcagtcagtgacctgggggttggggacccctgccttaattagattattttagctagttttatgttgaagaatgatgtcccccctttggtagttgcaagaacaaaagaggatatttcttttttttttttttaaatgaagtctcactctgttgccctggctggagtgctgtggctcaatctcagctcattgcaacctctgcctcccaggttcaagtaattcttctgcccagcctccagagtagctgggattacaggtacccactaccacacctggctaatttttgtatttttagtagagacggggtttcaccatgttggtcaggctggtcttgaactcctgacctcaggtgatccacccacctcagcctcccaaagtgctgggattacaagtgtgagccaccgcgctctaccaagaagagatttcttgattatctttctgggagtctgttttacgaatgttgttaattaaaaataattgcatcttcaaggctcagctctgaaatacttaaaatatcattattaaaaaatgggcatgagactcaaactttactagaaaaaatgaaataatataaaatgattttatttaatagcagtggaacaaaggacataatatcctctattttaataatactggctaacttttattacgtaattatgtatcattaagtgggatgtatgtattatctcaatcttcgtgacaaccctatgagataggtgctgtttttatccctaatttaccaacaaactaactgaaaagtatgtagctgtcagactaagattcacattctgaaaatctgacaacagagtttgtgttattaatgacaacgttataaccctgcccataatggcatatgctcctttaatttgcctgtatcagtcagtaactcatcattgatgtcttcctccaaaaataaatatggaccaatatagttagtattagtaaggccttagtgtgccatcataactgaccatagtttatttaacctgctgcctactatagctattagtatttttaatatttgattattataagttgttatatgataaatgtcttatgtatatgtcttaatatgctttaatagccacttgcaagaaaaaaatgccaaaaattggaattttagtcaaatatcagacataagggctcacagtatactgaatcttgtgttagtaatcagaggaatacaagaactgaaaacacataggtgttactgtacagcagagagtctaaaatcagaatagactgaataagtataaggtagaagataataaaaaacagtaaagaaattcaggtcacaggccttgggagttcataggaaggagatgtccagtgctgtccaatagaactttccatgatgatggatttgttctatgttttccagtgtggtagctgctcaccacatgtggctaataagcacctgaaatatggctagtgtgactgggaaactaacttttttttttttttttgtcgagatagagtctcactctgtcgcccaggctggagtacagtggcgagatctcagctcacagcagcctctgcctcccgggtggaagcgattttcctgcctcagcttcctgattagctgggaccacaggcatcagccaccatgcccagctaatttttgtatttttagtagagacaggggttcactatattggccaggctggtctcaaactcctgacctcaaaagatccgcccaccttggcctcccaaagtcctgggattgcaggcgtgagccgccgtgcccggcctgaacttttaattttatttaaaatttgatttaacttttttttttttttttttttgagacagagtctcgctctgtcgcccaggctggagtgcagtggtgcaatctcggctcactgcaagctctgcctcccaggttcacaccattctcctacctcagcctcccgagtagctgggactacaggcgcctgccaccacgcctggctaattttttttgtatttttagtagagacggggtttcacgttgttagccaggatgatcttgatctactgacctcgtgatctgcctgcctcggcctcccaaagtgctgggattacaggcgtgagccaccgtgcccagcttaaaatttgatttaaataaccatatttgtattgaacagcacaatttcataccttaagtttttattgtaatgattcaaagtgaggctaatgggtttttattgttagattcaaaaacaaagtttttattgttagattcaaagtgaggctaatgggacaagattattcagcagcagtttggaggatattgtggctgaaaggaaaatttcagagcacaaactgtcaatacgtttgtcaggagtacatgaaaagccacttcactgtgaccagcattcatatgtataagacattgcaatatattagcatacatggacatatgtgaaaaatcaaaagaattgcttccaatgttatgagctaaagggaaaaaagacattcagtaaaaatataacagctgttggccaggcacagtggctcatgcctgcaataccagcactttgggaggctgaagagggcagatcacctgaggtcaggagttcgaaaccagcctggccaacatggcgaaaccctgtctctactaaaaataccaaaattagccgggcgcagtggtgggcgcctgtaatcccagcgactcgggagcctgaggcaggagaatcacttgaacctaggaggcggagtctacagtgagctgagattgtgtcattacactccagcctgggtgacagagtgagactctatctcaaaaaaatatatatatataaatatataaatatatttatatgtatttatatataatatataaatatatatataactatattaatatataaatatatattatatatataactatattaatatatatatatatcagctgtttttagattatcttaagcttttccttcaagttgaagagaagatcgttcaacaaaggaaaggctttctcttatcaaaatgaaaaataagtacatatgtatgccggtgtgtatattttaaatttttattttatttttttgagatgagtctcactcccgtcgcacaggctggactacagtggcacagtctcggctcactgcaacctccacctcctgggttcaagtgattctccttcctcagcctcccaagtagctgggattacaggcatgtgccaccacacccagctaatttttgtattttttagtggagatggggttttgccatgttcgccaggctggtctcgcactcctaacctcaggtgatccagccacctcggcctcccagcgtgctaggattacaggcgtgagccaccgtgcccagcctaaattaatttttaaagttacagattatactttaaaaatatatcaagtaatgtcatgcagcttggcagtgctgacatatagatatatacatttttaaacttttttctctctctcagtttctgcctgtccttcgttctttctttatgtatgtgtgtgtgtgtgtatgttttcacaaatgtaattatattgtacattctgggttttaaccttattttttaatttagaacatatcttggatatttcccaaatcctttaaatattttctccaatttagtatagtatttaatatctacttaatattctgtttcatagatgatctgtaacttatctaaccagtcagctattgctggactcagaatgctgaattctacctccctgcatgcatcttttttatttttgctttttccagtaagccttttgcacccctaacctgcatgcatctttttttttttttttttttttttttttgagacagagtcttgctctgtcgcccaggttggagtgcagtggcgcgatttcagctcactgcaacctctgcctcccgggttcaagcgattctcctgccttaggctcctaagcagctgggattacaggcatgtgccaccatgcctagctaattttttttgtatttttagtagagatggtttcaccatgttggccaggctggtttcgaactcctgacctcaaatgatctgcccgccttggtctctcaaagtgctaggattacaggtgtgagccaccgcgcccggcctaacctgcatgcatcttaatacacatcatttgctttgggtagagtcccaaaattaggtttggatggtaaaagtctctcacatccttctacatgccatgttttaaggtcctacaaatctgtagcatttacacagtattcatttccctgtgatgttgctcatctggcatattattaatcttttaagtctgccattctaataattgtcaactggtatttccttaattaggatctgcttcattgtattgaaatttaataagttcggtggatgatatgctgctatttttagtgaattgctcatgcttaagtttcatttgaaaacattctgggcttcagaggcaaaagccagagttgagagcaagaccctgtctccaaaaaaaaaaaaaagatagtttgctttataattagagaaatgtggattcagaacacagctctgcctcttactaactgtgaatttgggcaagttacattattttaagccctcattacctcatctgttggatggagataaatgcattgcatggttaaatgttaatatgataaaggacccatcatgcagaagatcctaaaaatagctacttttgttgtcatcacctggcaaccgtgggcatgaatttacaccaccccagccttgatattgagatatcttccccagtttatatgcgcagaatggtggggttggaagtagaaatgatggcataacaggatcttattaacttaagtcattttaggagttttgacacacatctggtctcagagtcacttgttcttccccccagccccggtttctctggattctgtgcttctccatggaggaaactcaaggagaactgacaagttcttgtggttctaaaaccatggccaatgtaagtttgtgtttttcttccttgaaatactgtgtttttaaattcatgtgatcattgaagtctcgttatcttgagacttccttcctaagacaaccctgttgtggaacctgctccctagttactccctagttacagtgaaggatagtgccaaatagcctagtgtcttcctcatttgctcctgttttctcttatctgtgctcaaacattgtcttccatgtcagcctcagaggcagaggtcagatcccatgcattgagaggcttagaggactaggctggagtatgattggggcctgcatatggtagtttcaggcatctagccagggaatttccaagggatgaataagaaaacaaaagtcaattttgtggttgaggaggttgtgctggtctccagtgacatcagtgtcattgtggatacgtcagcatcctctggcttaggaacaaagcaagtattcctgaggtatggcaggggtagcaggtaggaagatcctccaatccctaatgatggctggaaataggctctgatccctaatgatgggtggaaacagaactggggaagaccttaaacattttggccaacctaaatgcctaagaataaaagaagaattagtctgctgtatctttaagatggatgatattattagctagccaataaatatactaactgaagacttttcttatgaggttattttgcatcatgatgaaccagagttttaacgaaatcacgtaatgtcagtcaaatcctgttttctaagagagattttagagtactttttggtgaaaaaattctttttccaaaaattttttgaagggaagagaggatgatggaacttgcatttattcagaactttaactgcaggcacataatgggcaatgtgcttatttatgctatttcacttaatttgcatcaacaatattctttaaaagcgtatgaacactttatttcagaaatattaatttctttattcttttacacacattgcaggcttgagccccagtttatttgcttactatgttgcttctttcctgcaaagcagttttccatcttgaaaatacatttaatttttttttaatacataggcttgtcatttcaggtatctttggcatttagggatgtgtccatagacctctcccaagaggagtgggagtgcctggacgctgtgcagagggacttgtacaaggatgtgatgttggagaactacagcaacctggtctcactgggtaaggtatctttcgaaatcgtttacaatctgttttctggagtatcagctttctccactgtcaaactttagaactctgttttaagaggctgactgacacccctatttctaaagtcatagtttcagcagtgttggggtggaaatgggcacctgtgttaagcaacttcacctttctgaccctcagtgacattcactcctccctctgacttttcctgtcattgcttgcttttctaaataatttccaggtttgagttgtgtgacatcagatttcatataatgcatatactcagaattcctatagctgttctgtgttaatatctgaccttcctacaagacaacagctagtctcagaattctagttttccttgattatcaaaagaacctccatggattatacagtggtggattgagttaacaatagtcatttaaaactcaagccaacacaccccatcctaaaggagacatattctccttaacctgctttgcggttgaaagttaaagtctgtgaattgacattttctgttgaaggaatatctgaggaagaacctggaaatattttaggaaacttagtatatttctcctaggaaaatagtaccaacaacaaaataatactatatactgggcatattatatgcctttgcatatattaattcatttaattctcaccacagccctaagaagtcggtaatatcagccccattttgcatttgataaaagtgaatatgtgcagggtaactttgaaggtcacacagctggtaggtggcagaagatttgaacccaggccatagggctccagagggtgtgctcactggtcccctttctatactgccgttaacagcaaagcagaccttttcgctctctcaccttgtctctttagtcctgtaattgtgagtccatgttaacgtgaatattcttagatggcctttttcttctttactgtcatggcattgtctagtaccattttcacctgcagtttcttacaaatgtaaccaagtctgaattgtcatttcaaggttatggttgtttttgtttttttctataacatgtgtcatttcttttctcatgagcaggatataccattcctaagccagatgtgattactttattggagcaagagaaagagccctggatagtaatgagggaagggacaaggaattggttcacaggtgagtgacagcaaattaggcgggagggtgctatcacaagttatgacccatgatgtcagggaggaggcacagcactgagttgtttggaaagctcccttcaaaggcctgaggcctgtggaaaaaggactgatacctgggaagcattcagattctctctacattagctaccaaaggaactttacccaatttgccatactccttgtttctcttctctcgtatttctctcctctttcaaagtggggctgctttctttcttccccattgatgaccattttacgtgtgtttccaggcctcctttaacattttgatttatattcatttctccattgtccaagttttattcatcaaatatttcccatttacctaacctaagccaggcactgtgctagagtttaggcactactgatagacactcttgtcacagagatgttgatattatagtaagggaaacatgttgtcaatacgtaaacagataataatcaagttttcatatgtgttgtgaagaaagttaagtagagtaaggagctagagtgttggggagttagtagggctaatttagataagatcaggaaaaggccattttgaggtgatgatatttgaaccagagacataaagtaaggtctcaggccatgtgagtattgaggaagaacattacaagcagaaaaagctgcaagtgcaaaggttctgagatgaagaaccatctgtgtttattcccaaagtaaattatgccacctgatgtgaacattcttgtacaattgtttttgtgttcagatgttttcatttctcttgggttttcatttttcttgggaatatatggaagtggaatttctgggtcataggacaagtgtattttcttaatcatatttattgaggtataatttatatagtataaaatgtactcattttaagtgtcaatttttataacattttaaaacagttttattgacatataattagcatacaataaactgcacacatttaaagtataaaatttgctaagttgccctgtatattgtgaaaccatttcaaaatcaaaataataaacatatccatcacctccaaaagaaatccctccctcatgtccctctctacccactgcccaggtaagcactgatcatctctctgtcactataacttagttttcattttctagaattttgtataatggaattatatggtgatttttttcttccttttttaaaaatatggtgatttttaaaatttagcttcattcactcagcaaaattattttgagattcatccatgttgctatatgtatcagtacttcatttcttttcattgttgagtagtattccattgtatggatgtaccacaatttacttatccatttatgtataaggatggacattgagttatttccagtgtttggctattacagataaagctactggaaactttcatgtaaaattcttggtatagacttatgctttcatttatcttgggtaactgtctggggtagaatgggtagatcatatgataaatatatgtctattttttaagaaactgccacactgtgtttgaaagtggttgtatcagccagtagcagtggcttatgcctgtaatcccagcactttgggaggccgagacaggtggatcactggaggtcaggagttcaagaccagcctggccaacaaggtgaaacttcatctttactaaaaatacaaaaattagccaggcatagtgacaggcatctgtaatcccagctacttgggaggctgaggcaggagaatcacttgaaccctggaggcagaggttgcagtgagccgagattgtgccactgcactccagcctgggtgacagaccaagataatgtctgaaaaaaaaaaaaaaagaagaagaaagtggttgtatctttttactttcccagcagaagtttatgaaaattccagttcttcgacattcttgttagcactttggtatggtcagtcttttaaattttagctttgctaataggtgagtaatggtatctcactgtggttttaattttcattttcctaatgcctaataatcctgagcaactttttattcttaatttatcatccatatatcttctttggtgaagcatctattacagtcttctgctcattctctttgcttctttctttcttttttttgaaacagagtcttgctctgttgcccaggctggaatgcagtggtgcgacctcggctcactgcaacctccgcctcctgggtacaagcaattctcctgccttagcctcctgagtagctgggaccacaggcatgtgccaccatgcccagctaatttttgtatttttagtagagatggggtttcaccacattggccaggctggtctcgaactcctgacctcagatccacctgcctcagcctcccaaagtgctgggcttacaggcgtgagccactatacctggccttctgcccattttctaattgcattggttgtttgctaattattgggttttgagagtcccttatatattctggatgtaagtcctttatcaaatgtatgatctgtaaactcttaacagtgtcttctgaatagcataagctcttaatttgattaagttaatttatcacatttttctcttatggattgtcctttcagtcatatttaagaaatctttgcccaatataaaaagtacaaaaattttctgttttcttctaattttttttttttttgacagagtctcgctctgtcacccaggctggagtgcagtggcacaatctcggctcactgcaacctccacctcccgggttcaagcaattcttctgcctcagcctcccgagtagctaggactacaggtacacgccaccacacccagctaatttttgtatttttagtagagacagggtttcaccatattggccaggctggtctcaaactcctgacctcatgatctgcccaccttagcttttcaaagtgctgggattacaggcgtgagccactgcccccagcttttctagaaattttatggttttagatttttacatttgtatacctattgtacacaaactcttccagaaactttaagataagggaatacttccaaactcactcttcaagtccagcattaccctgataccaaaaccagacaaaggcattataagaaaagaaatctataagtcagtatctttcatgtacacaaatgcaaaaattctagactaagttttagccatttgaatccaacaatttatgaaaagaatagtagttactggccattcttggcattccttggcttgcagacgcatcactgcagtctctgcctccatcttcatggcaccctctcttgatctccctatgcctcgctcttataagtacacctgttattggatttagggcccaccctttttccatattaggtcacattcacaggcactgggagttaggaacatgtcttttctgggggccacaattcaacctactacatctgagaataaaggcgtttatttttctcctttctaaagcctgtgttcttcaccttgccttactctactagccaggacctgcagtgtaattcttgactagcaatgagtttgaggatctgtgaatgagtaatgataaaacaactgatgctcaccaaataaaatatctcagtacttgagttgggacagagacaaagagaaggaacagtagccacacacacagggcaaatgtaaacagttttggagatgcctaatgttcaaggtaacaataggtaattggaaaatgatgaaatacaaaaatgacttttccatttatacttttgattgagcaattttggatgtatctttgttccctttcagaagggaagtgatccaggaaagagcatatttaattgctgtactaggatgagattggaatcagggagatatattcataactatgttgtaatttggggaaattaagttattatacttagctgccctctcagtgacttgtttgtaatatttacagaggtggtttgcagaggtcttccaaataagaaaggggtttttatcaatggtaatatgtttgggttttattctagggggaacgagaaactctattctaaagggaaaagaattaggtacagattttcaaaatgatctccatcaaagccatttgatgaaaaagattttaaatgcacatatccaggacttgctcctatagattttgattttgtctggtttggtgcctgaagaacagtatatgtaagaaatttccctaaatccatcctaaataagcggatcactgatttaccctattatcctattcacctattttaccattctttttttttttttttgagacagagtctcgctttgtcacccagcctggagtgcagtggcacaatcttggctcactgcaagctccacctcctgggttcacgccattctcctgcctcagcctcccgagtagctgggactacaggcacccgccaccacgcctggctaattttttgtatttttagtagagacggggtttcaccatgttagccgggatggtctcgatctcctgacttcatgatccacctgcctcagcctcccaaagtgctgggattacaggcacgagccaccgcacccggcctattttacaattcttaaaagtcacatcattttctgaggtattttgccttcttttaaattgcactacaataatttagagttctctaagccaggaaccagcaaactatagcccatgagccaaatagctcactgcctgtttttgcatggctcttaagttacaactgttttttccatttttttaatggttgaaaaaatcaagattttgtttcatgtaaacactttttgaaatttaaatttcagtgtccataagtcaagtgttattataacacagccacacttattatcatctgtggctacttttgtgctgtaataacagagctaagtaattgtgacagagaccatatgcctcccaaggcctaacaccttcactatctggtcttttaaagaagaagtttgttgaatcctgctctaaaccatttatttctaatgtatgttatttctgtttatcttttatttctactatgaggtacaacccccatccctgccccaacacagaaaaatagcattatagcatttgtttactctttgcttttttttttttttttttttgcagatttggaatacaagtatattaccaagaatttgctttcagaaaagaatgtttgcaaaatctatttatctcaattgcagacaggggaaaaaagtaaaaacaccatccatgaggacaccattttcagaaatggtttgcagtgtaaacatgaatttgagagacaagagagacatcagatgggatgcgttagtcaaatgctaatccaaaaacaaatatctcatcctctacatccaaaaattcatgctagagagaaatcatatgaatgtaaggaatgtagaaaggcctttagacaacagtcataccttattcaacatctgagaattcacactggtgagagaccctataaatgtatggaatgtggaaaggccttttgtcgagtgggagaccttagagtacatcacacaatccatgctggggagagaccctatgaatgtaaagaatgtgggaaggcctttagacttcattatcaccttactgaacatcagagaatacattctggtgtgaaaccctacgagtgtaaggaatgtgggaaagcctttagtcgtgttagagaccttagagtacatcagacaattcatgctggagagagaccttatgaatgtaaagaatgtgggaaggcctttagacttcattatcaactaactgaacatcaaagaattcatactggtgagaggccttatgaatgtaaggtttgtggcaagacctttagggtacaacgacatattagtcaacatcagaaaattcatactggtgtcaaaccctataaatgtaatgaatgtgggaaggcctttagtcatggctcataccttgttcaacatcagaaaattcatactggtgaaaaaccctacgaatgtaaagaatgtggtaagtcctttagttttcatgcagaacttgctcgacatcgtagaattcatactggtgagaaaccctatgaatgtagagaatgtggaaaagcctttcgtcttcaaacggaacttactcggcatcatagaactcatactggtgagaaaccctatgaatgtaaggaatgtgggaaggcctttatttgtggttatcaacttactttacatctgagaactcacaccggtgagattccctatgaatgtaaggaatgtggaaaaaccttcagtagtcgctatcatctcactcaacactacagaattcatactggtgagaaaccctacatatgtaacgaatgtggaaaagcctttcgtcttcaaggagaacttacccgacatcacagaattcatacatgtgagaaaccctatgaatgtaaggaatgtgggaaggcttttattcatagcaatcaatttatttcacaccagcgaattcacaccagtgagagcacctacatatgtaaagaatgtgggaagatttttagtcgtcgctataatcttactcaacattttaaaattcatactggtgaaaaaccctacatatgtaatgaatgtgggaaagcctttcgatttcaaacagaacttactcagcatcacagaattcatactggtgaaaaaccctataaatgtacagaatgtgggaaggcctttattcgtagcactcatctcacgcaacatcacagaattcatactggtgagaaaccctacgaatgtacggaatgtgggaagacgtttagtcggcactatcatcttactcaacatcacagaggccatactggtgagaagccctacatatgtaatgaatgtgggaatgcttttatttgcagttatcgacttacattacatcaaagaattcacactggtgagcttccatatgaatgtaaggaatgtggaaagacctttagtcgtcggtatcatcttactcaacattttagacttcatactggtgagaaaccttatagctgtaaagaatgtgggaatgcctttcgtcttcaagcagaacttactcgacatcacatagttcacacgggtgagaaaccctataaatgtaaagaatgtgggaaagccttcagtgttaattcagaacttactcgacatcacagaattcatactggtgaaaaaccctatcaatgtaaagaatgtggaaaagcctttattcgtagtgatcaacttactttacatcagagaaatcatattagtgaggaagtcctatgcataatgtaaagagaatacgatggcctttagaaaatgccctttagcagagaatttgtaatttaagaaattttctgtttgttacggaacatgtgggaatcccttttacttcatgctcacaatttatcagaaattatttcgtatgttaaagagtcgaaagactatagcatcactcagtccctgttagactttagaagattgatactgatgcactgcatcccaaaccatcaagggccttttcccctacaaactgttgttgaacagtgcttctctaaaatgcaataataatgggccaggtgaagtggctcacacctgtaatcccagcactgtggaaagacaggagttcgaaaccagcctgggcaacatagtgagaccctgcctcatggctttagtgagccatgattgtgccactgcactccagcttggtgacagagtgagatcctgtctctaaataaataaataaaatgcgggccaggcacagtggctcacacctgtaatcccagcactatgggaggcccaggtgagcagatcacctgaggtcaggagttcaagaccagcctggccaacatggtgaaaccccttctctactaaaatacacaaattagctaggcattgtggggggtgcctgtaatcccagctactcaggaggctgaggcaggaaaattgcatgaacctaagtggcagaggttgcagtgagctgagatcgcaccactgcactctagcttgggcaacagagcaagactctgtctcttaaataaataaataaatagattaccagaaaaatgaaaagaaaaaaacagacatacaaaataaaagccccagttttttattatggtatttaactgagttaactctgtcagattgctgcaaacatttctaaatacttgctcttggtatctataacttttgcagagaccagaagcaaacaatttgtgggccagtgtcaacacatggaccacactttatatagcactgtaacggaaaatgattctgttaatgtaatgaacatgggaaagaccagccttggcctatctttatgatatatataaataatataattctcataattccacctctgcctatgtggtgtttggcaaaacatgcccctgtgccttggtttttaaaatggtaataacagtaccacctaatagtatttttgtgaggatgaaatgctaataaaagataaaacctttaaaagagtatttggcacacagcattttatcaataaatattgctttatttttttcattggggatacatttagtacattcatgtgagaggaaggccctgtgggtgtaagaaatttgtaaaaactgtccattacctttcactccttatttagattggaataattaactggagataatatccagtaaaatagattaaacttccatttataaagtcagaacctatctctgaaaattaatgtgagaaagaaatctctagatttgatgggtgtgaagattatgagagtaaagttttgaagactcagggatagctgtaatgcttttttctttttataacccaaaaagcaggtatgtcagtcgctttttctgcccacaatgataaattaaaaacagccactatccatttggaaaacttaaaagaataatgaacagttatgttctatctagattcagcaattgttaatatgttgtcacatttggtttgcttatacataatatttacatattttgctgtagtatttgagtataaattgcagatactataacacatcacatctaagaataaaggctgcctcctacttaattgctatataacaattgtccaacctgtctgtgccccagggcagctttgaatgcagtccaacagaaatttgtaagctgtcttaaaacatgagattttttttgtgattttttttaagctcatccgccattgttagcacattttatgtgtagcccaagataattcttcttccagtgtaacccagggaagccaaaagatttgacccccagtaacttcacacctaaggagattagcaataattccataatctgtaatattcagtctgtgttcatattctcagttgtgttcattcttttcatttgtgtaaacaatgcttttcataggttatttttaaattcaggaaccaaattcatgaattacatttgtgcattgttcgtctcttttaaagtaagaatggcccttccccccacaactttattgcaacattgactttttttttttttttttttttttttttttgagatggagtctctgtcgcccaggctggagtgcagtggtgcgatcttggctcactgcaagctccgcctcccgggttcaggcaattctgcctcagcctccccagtagctgggactacaggcgccttcaaccatgcccggctaattttttgtatttttagtagagacggggtttcaccatgttagccaggacggtctcgatctcctgacctggtgatctgcccgcctcagcctcccaaagtgctgggattacaggcatgagccaccgcacccggccttcccaaagtatttttaaatgtgcttttttatccccagtatttcccattaactggaatttgggattagagacccaattagggacagattaaatattttggcaagaatacttaatgggagaaattttgtatttcaatttgtaacccattaggtggcatacaatgtcattataccactatggtatccttagttcattcacttggtgtagcagaacatacattccaaagatggccacaccaatatatcccattctgcatgttcatcttacaatgtgataccaacactccccaagaggtagagctcatggtccttccttttgaatctggccaggtgggcctgtgtttatggcaggaataacactgtgatttccacgactaagtcataaaaggcaatacagcttctgcctgacccacttgggatgaagcccagccaccatgctatgaagatgccaagtaatcacatagaaaagctaagtaaagctgtcctgattacagctgtaattgaggtaacagccgggatccagcaccaagtgtatgagggtatgagccttcagatgattctaacccttagccttcaggctatcctagctggtgctaagtggagcagagaaaagctttcccccatgagcctgcccaaattgcagatttacgtttaaaatatggcctgttttaagccactaagttttggagtagtttgccacacagcgataggtaactgaaatacttgcttcatatggtaatcaccaggtttctctgttgtagagctaaatatttcttttaatttagtaaacgatctgtagagtagtactttggcatttcggaaatttaaaatctccaataatataatgacactagatcaaaaagaaaatgaaaccataaaggacaatttagaaatgaatggtaagatcagaatttgtgaatgtggccaaacctgtgctcagtgaaaaatcagtaacctgttaatatattcaggaaacaaatattgagggccagcactttgtttctcctgctcaccactctactcccagtgacttaatactgtctctttaacatagtaatcacttataaaactgttaaaagaatgaagaagcattaaactcaagaaactaagggaaaaataagtcaatataagaaagaagggaggatcattaaaaggagttaatgaatttgaaaataaaatagacttattaaggctttgtgaaaaaatattaatacttgattttagtatagctaatcaaaggaaaaagataattacagcattgtgaatgagaattggatgtaagtacagatggaggagatattttttgttttattgaaaatttcaaggaggaagtaatatcaaaatttcactagctctttctacactgatattataatcctgataatacaacagatgaggatagttcttaaaaggcaaaaatgtaggtgagtcattacgaagaaagcagaaattctaaaccatcagcacattcattcaaaaacctagtaaagcaattaagcaaaataatttgtttacttggactgtccagggatagatctgttctagttttccaaattaatgatgggaaaggaagagctgatccagtccaagtatcttcaagatccatgttctcagtttttcttagctttaaatggccaaattgtggcttagattggatatgataatttcctcaatgcttaacactgagcacaatttttcacatatttgaaatcaaggtgtatcttacaatttatggcatctgacaatacttccaaccaggtggcagtcatcaagcagttttgtgaaaagccttcccggtaagaatacaaaagcatctgcaccaaaatatatagatttaatggcatgtaggggtttgcgtgaatatatacagttgaaattcaattcttccttaaaaataattgtaactcatttctttaagactaccatactaccactttcctcaacttggactaatgtccattgtcaaccaaaatgtctgtgatctcatggatccattatgatttgcaactccaggtccattttatgcaaataagacagccataatatatcattgtacaagtcatttactatctaattatatcattgctcaacatttgcaaattatttttacaaataacaataattggatgtaacaaaaagcagagtattttgagacgtatattaatgcaaaatattgttaatgtatcagtggattgttcctccaaagtaccagtgccttaacacaacatatctaaaagaacatctctgggaacagtagtacttaatggcaacttgagaattggtttgtgggcacacagccttgtgaagttttgaatactaaatcccttttttaaaaaagtgcttattatcaggctatcaatcaaaagatttgagtctttcagtaaagaaaatttgcttaattttatctagtgcatgataaactttactaaggaagtctcattcagaatatctaatattttggatgtgagcccacactggaaatgccataaccaaaaaagagtgaccctaaagatagaatattcagatctaatggcagatgcttagctatgctgggaaaggaagtgaattgtatattgctctgctgctcacatattcctctgcaataaattgctggcccagtttagtttttatatactcactactatactaatgaggatggctcaattttttatttgaacgtactataatgaatttaaactttcattggtatttatgttttaacaggttttcactatttcaaatatacttcaataaatatccttgtctgtgatcattggtttatgtgaattggaatttcagtagctgtatatacatggaagtacaattgctcatacatcatacactctttcagttatgttagataatactaaatcaaccatgggttctgtataccctactagatatttccaaattgttctcttagactcctgagaactggtaaattgagtgctatagcttcagtttaggtatgtttttgtatgtattcctaaattttgacttaagccatttttcaaatgtatttcttggcctatcatcattcctttactttgactttcatattcttggctttctccattatttttgtcttgtttttttcttccctctaattgacttgaatgtcattctggatactttgctatgttgatgcagtattttccaccacatgcatatagtctgaccatgcattctatctttatgagacattttaagatttataggttatcagttatgtaatctttgcagattacacaaataaaattttattttccagtatttatatttatttttcttattgcaatagctagaatcttcagaacacagttgaatattatggtagtaggtatcttttgtttccaaatttaatggaatatttcccaacatttttttctttggtcctatgtttcctcaagaacctacatttaatcatttactataatattcactcttcatttggggataaattctctgctgactttaaatttccttcaatatatgtaggggtagagggaggatgcctacttttgtagtgattgttaatttaaaaactgctgaattttttccaaggccattttgttatctattttaattttatgtttttctccttaaatttattgatgtattgatttgtacttatgactttattaaattttaaacatttcttgtaatatgctacaatttttgtcatactgctagagtccatttggtgatattttaattagaactttttcatctatagtcaaggcagtattatagtttctttttattttattgataagattttagagttgtaatgatctgttctttaacacctagaaacaatttgtccttaaagtatttacatttttgtatcttgatattacattttatgatttgctaaattcacttagctttagcagggttttttgttttttttttttgagacggagtcttggtctgtcgcccaggctggagtgcagtggcgcaatctcggctcactgcaagctccgcctcccgggttcacgccattctcctgcctcagcctcccgagtagctgggactacaggcacgtgccaccacgcctggctaattttttgtatttttagtggagacggggtttcactgtgttagccaggatgatctcgatctcctgacctcgtgacccacccgcctcagcctcccaaagtgctgagattacaggcgtgagccaccgcgcctggcctagcagggtttattttttataaattacttagaattttctataaacgcaatcaggacatctgtcaagacagttccttttaatttatatttcctttatttgccatactgcacaggctagggcattctgtagagtgttgaatggaaatgttcaaagcaaggctgggcgcagtggctcacgcctgttatcccaacactttgggagtctgaggcagttggatcacctgaggtcaggagttcgagacaaacctggccaacatggcgaaaccccatctctactaaaaatacaaaaattagctgggtgtggtggtgcacctgtgatcccagctactcgggaggctgaggcaggagaatcacttgaaccctggaggtggaggttacagtgagccaagatcgtgccactgcactccagcctgggcaacagagcaagacgctgtcttaaaaaaaaaaattatcagagcagacatccttaccttgagtctgactttagtgaaaaagcagtcaataatttatcataaagttctatgttagctgtttattttccctagatattctttttggttttttgacaaatcttggggcaatttgccattgaagtcatctgagtcaacctttctttgcggaaaggatttttagtggtagtttcaaggacaatataccaaaaatattgaatttttctatcatagcaaacaattgaaaatgaaatcaaaaaaattttcattgataaagaacataaaatacttaggaatatatttaacaaaacacatgcaagactactacctaaaaattacacaattttgttgagagaagctagggaaggccttaataaattgaaacatcttccataattacagatgagaagacccaatgtttagaagtcatttctcaaattgatctagggattcagtggaatccagtcagaatttgttctggagcacagcagtgaagtgaggattggagggagctggtgtagctgcactttgaggtaggttcattagctgttgcaaaaggctggtgatagtcactgttggaagatgatagaggaggagagagaagggactcagtaagcatggcagcacctcatcttgtgcatctttcttgataaggaaagggaggtccctggctgttgtcatgaaaatgtcagctgcttgctctgtggagaggaaaggaagaatacgggcaaccactgtcttccctttttggatacacatgatctgtacaaagcggtcatcactaggcctctcttgtccaggctgtttccctcttaagttgtcatacatgctacaaattccgtactttcgctcatccattagagcaggtcgctgtcttagacttaggagataatgtctttcatagtcctccacatcaaggagtaaactgtaggttttcttaattatgacgggtttttctcctcttgtctcgaatttgtttttcttttatctcatcatcctcactccaagatgtcacaacagcatcaatcatttttcagggattattcacactagaaacagtaagctttcccaaagagcccacaaattgtactggcttataggtgcgctccagtttggccacttgaggggtaataagcttgttatgctcctttttagggccatcacctcgtatttcttcagcagctgatggtttctccagtttttcaaagtaattctggtaataaaaatcatccaggtggggaccattgctttgcagttgcatcatctgaattttagaggcccaatccttttcccacagcaacatgagattggcatatggatcctttcggagatgatcttgatgactgctccagtgacttcctctatctcctgcaccactgagattctgatgctgatttctattctgttgctgtctctgatgcaagagtcaatggtgctgtggatggaggggagttgcgtccagtctaaacactgggacttgagatcttaagttttgcaagtgaggtcctgggccaggagggcgctgctgtggaggtggtgtagcggagggtggagcactaaagaaggcatggaagcctggtgctgggggaagcatctgcccaacttgcccttgtagcaacttgggattcatagcagcatgcagactaccaacaaatccagggacccatgcaaactggctgggagacatctgtccaggctgtagctgtgctcctccaagaagctgtgctctctgaaaggggctgagaacaggaggaacactaggaggaaaagggtgacccaggagggaagagttcaggacactgtagagctgatttggaggcatcctctcatcatagggaccaggataacacggtggcattgggggccgaacatggacaggctttgaacgcagaatcttccaaattggctttcgttttcagttgctggtttcaggcggaggaaagtctatggaataggactgcacaggctctgttgggtaaagctgggtacggccatctgcttaggtggggtgcctatggggacagctctaacaggaggactgccaatgacaggtgaagttgaccaccttggtaatgcatgttcagaaaggtcccaatcattttctggaccctggggggcctctgaggcaaggcatattctaatacagacactgtagacatttcctaagtgagcagtggtcctcagatttgcctcataactttggatccatcccagatactggaattcagatttcctggttggggttataaaactggcctggtctgcactgccctcatgatagctggatcttctagttcattttcaatcaccatcttactgagcctttctgccagattttcctcatggtcacccaacaagtccatttcttccctttctccattgcctgtttgttcattaactgccactggtagcttttcttccaattcagccaggcactcatgtgcttcctgccaatcatcatcaactgcacctgacccaaaaatatcatcattgaattgatcaatctcttcatcttcttctctcagtccctgaaattcatcttcatcttcatccagaagacaatcctcccaagactcatagtggaacattcttggggaggtgggggggagtggggaggggagtgggggagggagggaagaagcactgactccctgggctcctccatgggcaggtcctccaccagcttgcgacccctggccacctatttctgtttctttttttgttcctatgaattctagttactatcatgtatcatttccttactccaatacaactctgctgtcatttacttcctttatgctgttattgtcaaatatattacatttccatgttataggcccaacaatataattatgtacatactgtattatacaactgccttttaaatttattaagagaagtaaaaagaaatgtgcatttgtgctgctttttgtaattttaattatattaattttgttctttttaaaaatgtggttttgaatttccatgtagatttacttgctttgtttgaataacctttacaatttcttatgtggtaggtctgggaagggctttatttcaccttcatttttgaaagacagtgtgttactgcttgacagagcttttgtcgtttgagtactttgaatatatcatcccactaccttcatcccctccattgctttggataagaagtcagctgtcaatcgattggtgttccattgtaagcgacacatcatttttctcttatatttttcaacattttctttcacttttagcatttctactatgataggtctgttcatggatatcttcgcattcattctgattacagtttgttgagatgcttgtgggtattgattaatgtttattcaacaaattgtggatgtattttgccattatttctttgaatatttttgtgctcatttctctttctcctttccttctggtattctcattacatgtatgttcatgcacttaaaagtgctctgttcatattttcttgttcttcaaggctctgttcatattttctttgttctattttctcattctatttcattttattttcttattcttttttctagtgggaagatggaattgaggttgcataatttccattgatctgtttgaaagttttctatttacttgctgatcaaatttgtttagcccttctaatgaattttttattttggttactgtagtcttcaactccagaacttacatttggttcattttgtcatttctccttattgattttctttatttgatgagacgttatctttatattttcctttactgctgtgaatatataatggctacatcgaagtttttgtctattaaatatgacatctgttccctgtcataggccaacctgttgccgtttttttttgttgttgttgttgttttgttttgtttttttttaagagtcttgctctgttgcccaggctggagtgtagtggtgtgatcttggctcactgcaacctctccctcctgaattcaagcgattctcgtgtcttagcctagttataggcatgtgctaccatgcctgcctaatttttgtatttttagtagagatgggatttcatcatgtagtccaggctggtctcaaaactcctgagctcaagtgatctgccaaccttggtctccaaaagtgctgggattacaggtgtgacccactgcacctggcctgcttgctgttctcctgtgtataggtccaactttcccatttgtttgcatgtcttaatttactttttattattttcctaataagtagacatattaggaaacatactgtagtgatttgcctgtcccctctccagagcttgttcttgttgttgtttgcttggctatgtattttgtgttttggctaagctattttagtaaaatcgatttccctttccccttgcagtgtgaagtattttgtgttgttcctcagccttaaacatatgcagttaccctgctgtgacaatggttttaaacaggagtctttttgactatctttccctatctctctgttaagataactgcccccttggtattatttccagcccactaagctccgctgccgtctatctggtcactccattgttttcaacatttccttggagcctaaattattaagcagtttaatataatttaagtcaggcagggctaatttttgaggccagtttttaaggtttcttttgacctttggagggctccttagctgtctcttcccatggaattatctgattaactacctggcctatggtttatgttgttgtgtttactttaggggagctatttgtttgacactgtttcagataaagtccattcctttggagagagcttcagagctctattcttatggactgccactccctctggacaaaatctctgaaccaccattctgggtaatgggctgggttgtagccatcttgttttttatgttatgaaacctctgccttagaagcaagtggaggcaagggcaatctgggtgcaaatgagttcactctgcctgggtagagtttccaaactctgggtggggctgggggaagcaaaggagccccaaacctcctagttgcgttcaccaggaatttagccactttaaccaagagctggtggggataagaaaccctggaggcatgcccctcctgttgatatatgacaaaccttgattgacagctgcagccccatcatcttggcagcatccacccacagagaagcttctatcaaattgagctgtgaagagtaaaagggagttgtgtcttaaatgccacaaattctcttaccaagttcttggttcttaccaagttttagtagaatttcttgatatttcacttcctatatactgtttggacactttcagacctcaaatggcaaggtttttatacatttttttttgccagttttattagaaaatgagtttgcagagcccccccatctaccatccagaagtggaactacatatagtcatttaacaatagtttagcattttctgtcatctcattctggagaatcatagatgtggcagaaatacatattcttgaagaaaaaaaatgtctcccttatgggtactgtgatttcaatagggtgtgggataagtacatgacaacatgcatgggatagacactctgttctctacagatccgtgctttggaattacagaacataaaagatataatgatggttattactttttacatgtgacaatctagttgtagcgtttaagattaaatttggttgtgagtaaaatagtaaaactgccccaaattaaagtggataaaatataataaaagttaatttctctgtcatataatatggatgtaagcctgatactgtggccttgctctaaaccaatcatgaattttaccattctggcatcagaatggaatgagcactcagacttatacagaacttggaagaatagtaaataattctggttacccttcacccagatttctcaaatattaatatattaagctagtttgttttaagaggtttccagaattgccaaaatattcacttacatcctacttgccataagttatgtcacatgacaacaccttggagaaataactgcagtccttattctagatagtcacagccaactatcaataaaaattactggttctataatcatgaaagcagggtagaatggatatgcgggcctaataaataacagatcctgacccactgaggaatcctggagatggtttcattttgatcaattacaaatgaagacagtgaatccctgagaccacaacttgtgcagaagactcattgaaatggaatggtattctggaaattaagacacacaggtccgttatccctcataccccaagctggatgatcacaataccctgtaaaaggatgacagaaatcttgtgtctactttttcttcttttctggggagtctatgaacattcaagataacatccatgactgaatattctaaaacaagtttctttacaacgctgctcagaaacaccatgacaaatttaaatcagagcaatatctccaaaaatgggaggcagattaatgtatcatttcagccaggccttaaaaggagataaacttctcagctatcaccatacataaaacataattcaataaaataccaaatgcaaacaagagcagatcatagaaatgtaagttgagaaaattcagagggaacttctgaccttaggatgacattttcaactctgaaactattaaaagaattctaacaaaagcagcatctttttttccatacctgtaactgccatgtgcactcacagcagccagattttttggtctctaattcttttttcctctaaaaggaaccaggactccctaagataagagggtattaaatcatgagttgattccatgactcaggacaagaggcatgggggacatgaaccaacaaacagggtcagtcttaaacatcctcttacggcctgaaaacaatattcctttaaaacatcaaaagaaaaaaataagtagtaaaaaaaaaatgtaaatggattcctactggccacattatgtcaatttgagcataaataataataattactacaggtgcttctcaacttacggggagttatgtccaaataaacccatcataaattgaaaacatcatacaccatatgtgcatttatggtctacaatattttcaatttaacaatgggtttatctagatatagccccattttaagtcaaggagcatactctgactgagtatgtcttagttttgtgttgctataaaggaatgtctgaggttgggttattaataaagaaagaggtttatttggctcagtgttctgtaggatttacaagaatcatggtgcaacatctgcttctggtaagggcctcaggctgcttccactcatggcagatgaaagggggcagtgtatgcagacatcacatggcaagagaggaagcaagagggtgaggaaggaggtgccaggctcttttgtacaaccagctctcataggaactaacagagtgataattcaccccccaatccagagaggacattaatttattcatgagggatcttctcccatgacccacacacctcccattaggccccacctccaacattgggatcaaacttcaatatgagatttggaggggataaatatccaaactatagcagcatatcacttttgtactattataaagctgaaaattataagtcaaaccattttaagttggggattacaggcgtgagccaccgtgcctggccgtgatttttaaatttgtacatacttggtttgtaactttaacaaatatattaaagtgttttattatgtttgcaaagggactctgacttccaacatagtactgccatgattgcatgatgatagagtttcaccgaaaggctgccagggatctttctgacaactcttaatgatactaccgggatgtgcaatgacccagaaaggagttgtgctaggttaatacccagggactctgctgatttcaaagaagaaagttcaagagaatggatagaaaaaagatgaaactggaaataaaaaataggaacataagatttgaaagccaagttttatataatcttgttttataagttgtataacatcattgcaatatcaatacctgaaaaatacttggaaaattataactttacttatgattatagatgcaattaaatggtaaaagatagaattaagtagtctattgaaagaataatcatctgaccagggtatattcataaaaagaagaaagctatcaatataaattatcactttatagatttttcaacacaatggaataaaatcacaaaggattattcttaatcttaaaaaaaatttaatctaattcatgatgccacatcggtatcatgttttgttttggggtttttttgagatgaagtctcactttgtcgcccaggctggagtgcagtggcacgatcttggctcactgccacctccaccttccaatttcgagtgattctcctgcctcagcctcccaagtagctgggattacaggaatgcaccaccatgtccagctaatttttttatttttaggagagatggagttttgccatgttggccaagttggtctcaaactcctgacctcaggtgatctgcccaccttggcctcccaaagtgctgggattacaggcatgaggccactgctcccggcttaatggtatcatgttttacagcttgatttaaagggttaatattttttcaaatttttatcaacagctcatgtaccagccatggtataggtgctggtgataaatgctgaacaaaaaagaggttccggacaatcttggctccctatacaatccaaagggtgccagttttgtactgagtacagtgtcagccatatcacacaagttgaattatgttgacgctttaatggcattcatttctcaatagtctatttcaattttcattttgtattcaatccagggcttaagtacacgtgactataacttttcagagatgacaacgtctctccatagattacttacccactacaaactaaatctttacaatggacttacggcggttaccagcttacccaaatgatcatccttagtttcactaatgcaaggacctgtacttaaatgttttctgacagtacaatatgacatagaaataacctacaaagtattcttccccaaaacgtttaatctagacctaagaaagcctctggacttactttcccttgtaaagaaaatacaaccaagaacaaggctaaatgacactataaagaaagaaatctaaacacatagccaacaacatttctgggctactcaaaattcaatgtcatttttttaaaatgagaaatgttctagaccagtggctctctaactctggttggtatcacagacacaaaacctggagaaataataaaaaacagaggcccaggcttataaactagggctacacttctgtaggtttactaagttccacaggggattctgatacccaccataatttgagagcatactttcatggggtttccatgctacaatacactaaagagagataaccaaatgcaatgcagaatctgcaatggactctccttagaaaatgaatagctgtaggccaggcatgctggctcatgcctgtaatcccagcactttgggaggccaaggcgggtggatcacgaggtcaggagatcgagaccatcctggctaacagagtgaaaccctgtctctactaaaaatacaaaaaattagctgggcatggtggcgggtgcctctagtcccagctactcaggaggctgaggcgggagaatggcgtgaacccaggaggcagagcttgcagtgagcccagatcgcaccactgcactccagtctgggcgacagagcgagactccatctcaaaaaaaaaaaaaaaaaaagagaaaatgaatagctgtaaaagatggtttgcaggccaaggaagaaatctgaagatggaatgatattacagaattatgaatattttccttaagggtaattatggtactatggttatatgatattgtctttatgtttgggtaacacacatgctgatgtaacaaggagtaaagtgtcatgatatctaaaacttattctcaatggtctaaaacttattctcaatggtacaacaaatatacaaaaaataaatgtggcaaattgttaacaattttgaatctaggtgggggggatatgtgtatatattttactattctttcaaaacccacaacaattatcaactaggttcaccatcttttatgggcaggatttgtggtatccccaaacaattacactagtaacaattacactagtaatcaaaaaacactggtcacagatcaccataacagatttaacaatgaaaaagtttgaaatattatgaaaactagcaaagtgtgacacaaagacatgaaatgtgcatatgctgtttggaaaatggtgctgatagacttattcactgcaaggttgctgcaaaccttcagtgtgtataaaatgcagtaactgcaatgcacaattaagcaaggtacgcctgtatccagtaaaatatttcacgggcagtaaactgtgaacatggcagctactctacattcctcacatcagtaactttctcaccaaaattatcttctctgaactctaaggcatttagtgtggctataaaatatcccacattctttacactcaaaggagttctcagcagtatgaatactctgatgttgagcaaatcccaggccacgatgaaagttcttcacacattcttttatgttcacaggatttctcatcaatatgaattctctggtgttgagtaaatttttcatacacagtgaaggcttgtctacactccttatattcataaaacttctaactataatgaattttctgatgttgcgtaagcagatcattcacagtaagggtttgctcacattctttacattcatagggtttcatgccagtatgaattctgtgatgtgcagaaaggactgaactaagtctaaaggtcttcccacatcctttacattcacagggttgctcaccagtatgaattttaacatgttgaacaaggctcgagctacaagtaaaggtctttccacattctttacattcatacggttcataccagtatgaattctttgatgtgcagtaaagactaagctaaatccaaaagttttccacattctttacactcacagggtttctcagcagtacggattctcagatgtacagtaagatcataattactgctaaaggccttttcacattccttacattcatagggtttctcatcagtatgaattttaacatgtttaacaggtttgaactatgactaaaggctttcccacattcttcacattgatatggtttctcaccagtatgaattctctgatgtactctaaggtttctaccactggtaaagcatttcccacatccttgacattcataagggttctcacgaatatgaaatctataatgtccatgaaattggtaatgatattgaaaggccttcccacattccttacattcaaaggttttcacccaagtatgaattttctgatgttcagtaagttgctactgatgtctgaaggctgtcccacatttcttacattcaaagggtttctcacctgtacaagtttttgatgcagagaaagttgtaggtgaagtctaaaagccttcccacactccttacattcatagggtttctcaccagtatgaatactctgaggttgaacaaggtttgagccacgattaaaggccttcccacactccttacatttaaatggcttctcaccagtatgaatgatctgatgttgagcaagctgtgtcagaagaccaaaggcctttccgcattctttacattcaaagggtttctcaccagtatgaattcggtaatgttcagtaagctggtaatgatatctaaaggtcttcctacactccttacatacaaagggtttcgcactggaatgagttttctgatgctgaataaggtttgaaacacgactaaagcctttcccacactccttacattcatatggttttacaccagcatgaatactctgatgttgaacaaggtttgagacacgattaaaggacttcccacattctttacatttaaatggcttctcacctgtgtgaatgttcttatggtgattaagctgggtgtgaagactgaaggccttgccacattccttacattcaaagggcttctcaccagtatgaaatttctgatgtcgaataaggtgcatatgaagtcgaaaggctttcccacattccttacattcaaagggtttctttccggtatgaatacttcgatgttgattaagatttgaaccacgacgaaagaatttcccacattccttacattcaaagggtttctcacctgtatgagttttctcatgttgagaaagttgtaggtgaagtctaaaagccttcccacactccttacattcatagggcttctcaccagtgtgaatactctgatgttgaacaaggttcgagccacgattgaaggccttcccacagtctttacattcaaatggtttctcaccagtatgaatgttcttatgtcgagcaagctgtgtcagaagactaaaggcctttccacattctttacattcaaagggtttcccaccagtatgaatttggcaatgttgaataagttggtaatgatatcgaaaggccatctcacattccctacatacaaagggtttctcattggaatgaattttttgatgctgaataagatttgcaccacgattaaagcctttcccacactccttacattcatatggttttacatcagcatgaatactctggtgttgaataaggtttgaactacgattaaaggacttcccacattctttacattcaaatggtttttcacctgtgtgaatattcttatggcgattaagctgattgaggagactaaaggccttcccgcattccctgcattcaaagggcttctcacccatatgaatcttctgatgtcgaacaagctttgtcagaagagtaaaggcctttctgcattctttacattcaaagggtttctcgccagtatgaattcggcaatgttcaatgagttggtaatgatatcgaaaggccatctcacattccctacatacaaagggtttctcattggaatgaattttttgatgctgaataagatttgaaccacgattaaaggctttcccacactccttacattgatatggttttacaccagcatgaatactttgatgctgagtaaggtttgagctacgattaaaagacttcccacattccttacattcaaacagtttcttaactgtgtgaatgttcttatggcgattaagctgggtgggaagattaaaggcttttccacattccttacattcaaaagttttctcaccagtatgaaatttctgatgtcgagtaagttgtatgtgaagttgaaaggctttcccacattctttgcatttatagggtttctctccagtatgaatactctgatgctgaataagatttgaaccacaactaaagtatttcccacattccttacattcatatggtttatgtgtattatgaataggagaagcatgagtataagcaggcatttcttcatagctgatgatcttctggttgatatatccttcttgatgtccctgtcgtccctcaaatctacttctatattctgagtcatttctaaaataaaaggcctcgaggccaagtgttttacttatttgctttataacatgtttgggtaaatttatttcaaaaatatcattttctggagatattttctcaggtccatattttgactccaaatctgaaagaaatgaagaaggcaaacctattttattttcctataacatacatgcatacaaaatccattaaacaaatggcctaagtataaaatataatactttcagggaagggatctgaaaaaggaaaagggtgccaataatgaatttatgtaagatggtggtgtgcataagggaacaggttaactttgtcaaatttaggtgtgaatcaaaaccatttggtaagattaaatatattgatattcaagcaactcagatgtacagaatcagaatttttagtgaagaaagctttttttttttttttaagacgaagtttcactcttgtcgcccaggctgcagtgcaatggcacaatctcagctcactgcaccctctacctcctgggttcaagtgattctctggcctcagcctcagcctccagagtagctgggattacaaacatctgccaccgtgcctggctaattttggtatttttagtagagacgaggtttcacaatgttggccaggctggtctggaatgcctaacatcaggtgatccacccaccctggcctcccaaagtgctgggattacaggtgtgagccattgtgcctggcctctattttttttttttttttttaagagacagggtctctctctgttgcataggctatagtgcaatggcatgatcacagctcactgcagcctcaaactcccaggctcaagcaatcctcctgcctaagcctcccaagtggctacagctacaggcacatgccactaagtctggacaatttctttttctttagtcttcctgcagtccaaagtctggctaatttttactttatttttatttttactttgtagagatggtgtcccaccatgttacccaagctggtcttgaactcctggcatcaagcaatcctcctgccttgatctcccaacatgctgtgatcaccagtgggagccatcacacccagccaaagctgtatttttaatatctctaccagatgattctgattcagatcaaagtttacagatcatacttaaaactggttttgaatggtttatctttagtcttagcacaaaatccaaaaaccttaacacagagaacaaaacttcctatcagggcactgtcctcctttgtggctgatctctaaccactccctccttttagcaaccagaacatgatataacctttctcttatcttcttgcttgcttagactgcttcatcttccaagaatcgtctggctttgctctttgtaacaaacatccaactcctcttttttttttttctgtttatatatatatatttttttaattttattattattatactttaaattttagggtacatgtgcacaatgtgcaggtttgttacatatgtatacatgtgccatgttggtgtgctgcacccattaactcgtcatttagcattaggtatatctcctaatgctatccctccccacctcctcccaccccacaacattccccggagtgtgatgttccccttcctgtgtccatatgttctcattgttcaattcccacctatgagtcagaacatgtggtgtttggttttttgtccttgtgatagtttgctgagaatgatggtttccagtttcatccatgtccctacaaaggacatgaactcatcattttttatggctgcatagtattccatggtgtatatgtgccacattttcttaatccagtctatcattgttggacatttgggttggttccaagactttgctattgtgaatagtgccgcaataaacatacgtgtgcatgtgtctttatagcagcatgatttataatcctttaggtatatacacagtaatgggatggctgggtcaaatggtatttctagttctagatccctgaggaatcgccacactgccttccacaatggttgaactagtttacagtcccaccaacagtgtaaaagtgttcctatttctccacatcctctccagcacctgttgtttcctgactttttaatgatcgccattctaactggtgtgagatggtatctcattgtggttttgatttgcatttctctgatggccagtgatgatgagcattttttcatgtgttttttggctgcataaatgtcttcttttgagaagcgtctgttcacatccttcgcccactttttgatggggttgtttttttcttgtaaatttgtttgagttcattgtagattctggatattagccctttgtcagatgagtaggttgtgaaaattttctcccattttgtaggttgcctgttcactctgatggtagtttcttttgctgtgcagaagctctttagtttaattagatcccatttgtcaattttggcttttgttgccattgcttttggtgttttagacataaagtccttgcccatgcctatgtcctgaatggtattgcccaggttttcttctagggtttttatggttttaggtctaacatgtaagtctttaatccatcttgaattaatttttgtataaggtgtaaggaagggatccagtttcagctttctacatatggctagccagttttcccagcaccatttattaaatagggaatcctttccccattgcttgtttttgtcaggtttgtcaaagatcagatagttgtagataggcagcattatttctgagggctctgctctgttccattgatctatatctctgttttggtaacagtaccatgctgttttggttactgtagccttgtagtatagtttgaagtcaggtagtgtgatgcctccggctttgttcttttggcttaggattgacttggtgatgcgggctcttttttggttccatatgaactttaaagtagttttttccaattctgtgaagaaagtcattggtagcttgatggggatggcattgaatctataaattaccttgggcagtatggccattttcatgatattgattcttcctacccatgagcatggaatgttcttccatttgtttgtatcctcttttatttccttgagcagtggtttgtagttctccttgaagaggtccttcacatcccttgtaagttggattcccaggtattttattctctgaagcaattgtgaatgggagttcactcataatttggctctctgttggtctgttattggtgtataagaatgcttgtgatttttgtacattgattttgtatcctgaaactttgctgaagttgcttatcagcttaaggagattttgggctgagacaatggggttttctagatatacaatcatgtcatctgcaaacagggacaatttgacttcctcttttcctaattgaataccctttatttccttctcctgcctaattgccctggccagaacttccaacactatgttgaacaggagtggtgagagagggcatccctgtcttgtgccagttttcaaagggaatgcttccagtttttgcccattcagtatgatattggctgtgggtttgtcatagatagctcttattattttgagatacatcccatcaatacctcatttattgagagtttttagcatgaattttgttgaattttgtcaaaggccttttctgcatctattgagataatcatgtggtttttgtctttggttctgtttatatgctggattacatttattgatttgcatatgttgaaccagccttgcatcccagggatgaagcccacttgatcatggtggaaaagctttttgatgtgctgctggattcggtttgccagtattttattgaggatttttgcatcaatgttcatgaaggatattcgtctaaaattctcttttttcgttgtgtctctgcccagctttggtatcaggatgatgctggcctcaaaaaatgagttagggaggattccctctttttctattgattggaatagtttcagaaggaatggtaccagctcctccttttacctctggtagaattcggctgtgaatccatctggtcctggatcttttttggttggtaagctattgattattgccacaatttcagagcctgttattggtctattcagagattcaacttcttcctggtttagtcttgggagggtgtatgtgtcgaggaatttatccatttcttctagattttctagtttatttgtgtagaggtgtttgtagtattctctgatggtagtttgtatttctgtgggattggtggtgatatcccctttatcattttttattgcatctatttgattcttctctcttttcttctttattagtcttgctaatggtctttcaattttgttgatcttttcaaaagaccagctcctggattcattaattttttgaagggttttttgtgtctctatttccttcagttctgctctgattttagttatttcttgccttctgctagcttttgaatgtgcttgctcttgcttttctagttaattgtgatgttagggtgtcaattttggatctttcctgctttctcttgtgagcatttagtaccataaatttccctctacatactgctttgaatgtgtcccagagattctggtatgttgtgtctttgttcttgttggtttcaaagaacatctttatttctgccttcatttcgttatgtacccagtagtcactcaggagcaggttgttcagtttccatgtagttgagtggttttgagtgagtttcttaatcctgagttctggtttgattgccctgtggtctgagagacagtttgttataatttctgttcttttacatttgctgaggagtgctttacttccaactatgtggtcaattttggaataggtgtggtgtggtgctgaaaagaatgtatattctgttgatttggggtggagagttctgtagatatctattaggtctgcttggtgcagagctgagttcaatttctgggtatccttgttaactttctgtctcgttgatctgtctgatgttgacagtggggtgttaaagtctcccattattattgtgtggcagtctaagtctctttgtaggtcactcaggacttgctttatgaatctgggtgctcctgtattgggtgcatatatatttaggatagttagcgcttcttgttgaattgatccctttaccattatgtaatggccttctttgtctcttttgatctttgttggtttaaagtctgttttatcagagactaggattgcaacccctgcctttttttgttttccattttcttggtagatcttcctccatccctttattttgagcctatgtgtgtctctgcatgtgaggtgggtttcctgaatacagcacactgatgggtcttgactctttatccaatttgccagtctgtgtcttttaattggagaatttagcccatttacatttaaagttaatattgttatgtgtgaatttggtcctgtaattatgatgttagctggttattttgctcattacttgatgcagtttcttcctagccttgatggtctttacattttggcatgtttttgcagtggctggcaccggttgttcctttccatgtttagtgcttccttcaggagctcttttagggcaggcctggtggtgacaaaatccctcaacatttgcttgtctataaaggattttatttctccttcacttatgaaacttagtttggctggaatgaaattctgggttgaaaattctttcaagaatgttgaatattggcccccactctcttctggcttgtagagtttctgccaagagatccgctgttagtttgatgggcttccctttgtgggtaacccgaccttactctctggctgcccttaacgttttttccttcatttcaactttggtgaatctgacaattatgtgtcttggagttgctcttctcgaggagtatctttgtggcattctctgtatttcctgaatctgaatgttggcctgccttgctggattggggaagttctcctggataatatcctgcagagtgttttccaacttggttccattctctccgtcactttcaggtacaccaatgagacgtagatttggtcttttcacatagtcccatatttcttggaggctttgttcatttctttttattcttttttctctaaacttctcttctcacttcatttcattcattttgtcttccatcactgataccctttcttccagttgatcgcatcagctcctgaggcttctgcattcttcatgtagttctcgagccttggctttcagctccatcagctcctttaaggacttctctgcattggttattctagttatccattcgtctaattttttttcatagtttttaacttttttgccattggtttgaatttcctcctgtagctcggagtagtttgattgtctgaagacttcttctctcaacttgtcaaagtcattctctgtccagctttgttccattgctggtgaggagctgcattcctttggaggaggagaggcactctgctttttagagtttccagtttttctgctctgttttttccccatctttgtggttttatctacttttggtctttgatgatggtgacgtacagatgggtttttggtgtggatgtcctttctgtttgttagttttccttctaacagacaggaccctcagctgcaggtctgttggagtttgctagaggtccactccagaccctgtttgcctgggtatcagcagcagtggctgcagaacagtggtggctgtagaacagtggatattggtgacccgcaaatgctgctgcctgatcgttcctctggaagttttgtctcagaggagtacccggccgtgtgaggtgtcagtctgcccctactgggggttgcctcccagttaggctgctcgggggtcagggaaacacttgaggaggcagtctgcctgttctcagatctccagctgcgtgctgggagaaccactcctctcttcaaagctgtcagacagggacatttaagtctgcagaggttactgctgtctttttgccctgcccccagaggtggagcctacagaggcaggcagtcctccttgagctgtggtgggctccacccagtttgagctccccggctgctttgtttacctaatcctgggcaatggcaggcgcccctcctccagccttgctgccaccttgcagtttgatctcaagacagttgtgctagcaatcagtgagactctgtgggcataggaccctccgagccatgtgcgggatataatctcctggtgtgccgttttttaagcccattggaaaagcacaatattagagtgggagtgacccgattttccaggtgccatctgtcacccctttctttgactaggaaagggaactccctgaccccttgcacttcccgagtgaggcaatgcctcgccctgctttggcttgcacacagtgcgctgcacccactgtcctgcatgcactgtctggcactccctagtgagatgaacccggtacctcagatggaaatgcagaaatcacccatcttctgcatcgctcatgctgggagctgtacaccggagctgttcctattcggccatcttggttccacccctctaactcatcttttaagccttaggataaatgttttcctcagaacatctgaatgaatgaataaagccaccgtaacatatgggacatcataaaacaacaaaatatttgaatttttgaggtcctagagacaaagagaaaacataaaggatagaaaatctatttaatgaaataatagcaggaaactttccaactctagtaagagatgcagacatcttgatacaggaagctcagagatacccaaatagatacaatacaaaaaggtcttctccatggcatattatggtcaaaatataaaagtcaaagacaaaagagaatactaaaaacagcaagagaaaagcatctagtcacttacaaggaaactctcatcagcctaacagcagatttctcaacagagagaaatgagagagaatgtgattatacattcagtgttgaaagaaaaaaatcaccagtcaaggacactatcctcagcaaagtattctacaaaaatgaaaaagaaatagtctttcccagacagcaaaaggtgacagaattcatcaccactggaccaaccctacaagatatgttcaagagtcctacacctagaagtgaaaggacaatatctaccattgtgaaaacacacaaaagtataaaacctactgacacagcaaacatacaaataaggacaaaggactcaaatgttacccctaaagaaaacaaccaaaccacaatgataaaaaataaaagagaaaggaacaaaggataaacaaaacaactagaaatcaattaataaaatgataagaatcagccctcacatatcagtaatcacactgaacgtcaatggattaaacttcatttaaaagatacagacgggctgaatggatgaaaaaacatgatccaactataagctgcctacaagaaactcttctcactggtaaagacacatatggattgaaagtaaaagaacaggaaaagatattccatacaaatggaaaccaaaagtgagtagaaatagctacgtttatatcagaaaaaaacagattttaagtaaaaaacagcaaaaagagacaaagaaggtcatcatataatgataaagggatcaattcagcaagagaatataacaattctaaacatataacaccaacaccagaacacccagatatataaggcaaatattattagagcaaaagggagagagatactacagtataataatcactggggacgtcactgtgccactctcagaattagatcatctagagagaaaattaacaaagaaacattgggtttaaacatacctgagaggatgagggaaaaagggaactcttatatactgttggtgggatataaattagtacaatcactatggaaaacagcatgcagatttctcaaaaacctgaaaatagaactaccatatgatccaacaatcccactactgggtattaatccaaaggaagataaaatcagtatatcaaaatgatacctgcacttgtatgattactgtagcattattcaaaataccaaaggtatggaatcaacctaagtgtcccccaacagacaaacagataaagaaaatgtgatatatacacatggaatactattcaggcatttaaaaaatgaaatcatgtcatttgcagcaacatggagggaatcggaggtcagaaagacaaatatcagactgggcgcagtggctcacacctgtaatcccagcactttgggaagccgaggtgggtgaatcacctgaggtcaggaatttgagaccagcctggccaatgtggtgaaaccctgtctctattaaaaatacaaaaattagccaggcgtggtggcaggcacctgtaatcccagttactctagaggctgaggcaggagaattgcttgaacccaggaggtggaggttgcagtgggccaagatcgcaccactgcactccagcctgggcgacaagaatgagactccaactcaaaaaaaagaaagacaaatatcatatgttctcattcatatctggaggctaaaaaaagatctcacagaggtaaagaatagaatgatagaaaccagaggctgggaagggtgtgtgggtgaggggtgggggatgaagaggagttggttaatgttacaaacatacagttaaatatgaggaatgacttctaatgttcataagcagagtagagtgactctaattaacaacaatgtattgtatatttcaaaatagctagaagacttgaaatgttcctatcagaaagaaatgataaaccctcctctggtggatctgatggatacctcaaataccctgacacttgttcattacaccttctatgcatggaacaaaacataacatgtatcccataaatatgtacaaatattgggtatcaattaaaaatgaataaataactcttgaagaacttcccacattcctcacaacgacagtcaaaaccctgtatgatacgactccgacgtaactctcagacctttcttcccgctgttccattacttactccacctttgtgtttcctgctcagtctgactagagtacttgaacacttacttcacatctctatgcaagcaagcccacttccagacaggtaccctaagcacccaagtgctgccattctcaccccatcactcctatttccttgtctctatagcatgattatttggtattccttatctattcatttgcttacttgtttgaggcatgtctcaccaactgctggtaaagtccatgacagcagtgactttctcagtcttgttcattacctgtacattacagtattgaccagagccaagcatatgccttctaggaatgcgcactctatacatatttactgaacatgaatacatttcttagtgaaaacacatgtagaaatctaaatgcaaaagcagagttggaaagtagctggatccaaaatacgtgttaaaagtttacactgggggccagaagcattggctcatgcctgtaatttcagctacttaggaggttgaggcaggaagactacttgaggccaagagttcaagatcagctggggcaacatagcaagatgctgcctcttaaaaaataattttaaaaactgtttaaagtttacactgggaaagaaagaggaagctcacttcattaaaagaggaagaaaataacagaaattaggtgattagtaaatgatgaagttccttggggacagctcctacagtgatcttatttccttcccaggtcttgggcatttttgtccagtgggggaccttgggttattgaagaaagttttccaaaccacatctcaggggtgtgactcctctctgagcacatgggctgtccgggacaatgatggcttccccctgcctgctttactctcacttacctggataccatctgcttgtttctttacttacaacaatccagggctctttctcttgctctagtaatgtaatcacatctggcttagaaatggaacttcctgcttaaaagaaataacacatgtagaatttttttaatataaaaattttttttaaaccctgagacctagttaaacttataataaattacaagccaaaacaatattgagaagagactccagataagagaggattgagtaagggatcaactatgtttaaaaaaaaaaaaagcactttcatttaaactcataatagaaacttatccctcaagaggaggtataatttagtggttaacagcaggaaacttcaagccagattacctggttgaaatcctgtctctgccacccactagtactttgacattaagtaagtcacttgaactctctgtccttcagttttcccaactctaaaacagaaatataataatgcctgttttataggattgatactaatattaaataaggtaatatatgtaaaatacttctaactctcactcatacgtagtagcacaaagttaaaaattattatgtttattgtcattatttattttgcatccttagacatttacagctcattttaagaattttcacccaacagaaaagcatacacttcatggcctgaaactttcaactacaaaacaagtaacggaaggtctgtcgaaggaaatggaatatactgacttagtgctaaataagttctgtcaacccaatcagtatatgtaaatcattgaggctctgttttgttttgtttttttgagacagtgtcttgctctgttgcccaggctgaagtacagtggcatgaccacggctctctgcagccttgacctcccaggttcaagcaatcatagaggctcttttaatagaaaaactcaacacactcttctccttacaggtgggccagaaaaacaaaaacaaacaaagaaaatctacagtaattctgagatcaaacataatatgaaacctggttcttgaacaatatcattcaacgaatatacaagatttcaaattcagccccatggtcatgaagagagagaggggattacagagatgaccagcataatggaggaggccctggtgcagtaggcaagatgcagaggctccaaggaggtgcctgttttcaacccaacaaatctcaatccattccttcgggaataagaagaaggaatccaactacctcttaaaagacagccctgaaactcatgatgaagaaagctgatattccagagaacagatacaaaaataactgggaccaatgaccttacccagtgatatcaggtggctgtagttctccaacatcacatccctgtacaaggtcctctgatcaggctgcaggcactcccactcctcctgagagaagtcaatggccacatccctgaatgtcactgatccctgaaaccacaaacacatggattatggtgaaattgaagaaagttgtttcaagacgaaaggagaggaagtgaaggattaaactgcaataaaggagcaatatggaaaatcgcagagtgcctacacattcttcaagaatcctgctgctggcctggtgtggtggctcatgcctgttataccagcactttgggagaccaaggtggaaggactgcttgagcccaggagttggcaaacagcctgggcaacataacgagatgcactccctggaaaaaaaaaaaaaagaaagaaagaaagaactgtcgtggtggcatgtgcctatagtcccagctacttgggaagctgaggtgggagtattgcttgagcctgggagttcaatgctgcagcgaagtgtgatggcactactgcactccagcctgggctacagagtgagaccctatctcaaaaaaaaaaaaaaaaaaaaaaaaaaggtggcagcatacaattgaggaatgccgttaatcctcaagcttactgtggtatcagatgatagcaaaagtattttttcttgtcatgacaaatgatttttataagctgcgtaaaattcaaaataactgacatattagatttagtcatatttttctatttatacatttaagatggtcagagtctctaaggttttcccaaattcagagaatctgtaatcacctaccactcatgccctgaataatctctgttactgcccactgtcctcactgatcactttcctaaaagcctcataaagcagaacaccttgtcacgcttgcagactgaggccactcactatggaattctacctcagctacctagaaagctccagtctgtggaggagtttcaaggtgttcccgagtgtggtcaaatgcgacaatcatctgtaacttatcaaacccacaagaccatgtttccctgtggggaccaactcctccactgttccaacattctttctgaccaaggactgagttaagcacagactgaataacctgctcaaagaaaacatcaaagccagtgggaaaacagaggtacgaataggaagagcactgacttttattttttggtcaccaaacttcactgtaatgggacaaagtggggtgtaagattgtggatcctggccaggcacagtggctcacgcctgtaatcccagcactgtgggaggccaaggcagggggatcatgaggtcaggagatcgagaccatcctggctaatatggtgaaatcccatctctaccaaaaatacaaaaaattagccaggcgtgctggtgggtgcctgtagtcccagctactcgggagtctgaggcaggagaattgcttgaacctgggaggcggaagttgcaatgagccaagatcgcaccactgcattccagcctgggtgacagagcaagactccgtctcaaaaaaaaaaaaaaaaaaaaaaaaaaatcgtggatccttacgtaagaaggttcaggtttaataataacagtcacctaacctaacctgaaagtcaccatatttcaagaagacagaaacaccaacttacatggaccatgtttctagaattacaaaattggtcaatcttcctcgggcttctcccctggaaaacaacaacaacaaaaaggccctaagtcaagctgtgtccgaaagcactagaacgaataaatattttatcctccattcctatttctcaactactcctgctcacacgcacacttccacccttctcccgtcactccctttttccctacacacactctcacaaataaactggcagtgaacaggtggagtgtggatgaaaccaagctctcgcctacatcccagggaacctgcggcggaagcatgaatgccgagcacaggcatttctgccttgaagttgtggcttccagccagtcctccactcttgggataccaatcttggcctaggactgggcctctgatcctgctgtaagcaatcctcctcccctagtccacctttcagagctgagaagggcttgcatcatccaatccagaacctctttgtgaactcaggattgggtgcagtggggcaaggcatgagaactggaaaggatatagacagaattgcatgggcagtgttcagcattctgagttcaccaaaagccagctggggtaagtacagttcagaatagccatgtaatagaatacaaagtaatcattaattgttccagacatatgattaacagaaaaatcaggttacaaagcaggataaacaatacgattacatttgtaaaatatatgtatatagaaatattaagcaaaagactaatagacatcaatacaaaaatttagacaggtatatgcatgctaacagtgcttatctctgtattgtagccccaattttcttctttttgctaaagagtatgtcataattgtgactatgcccaggcatttaacttagaatatataattatattcacacacacacacacacacacatatatacacacatatacacatgtgtatgtatctatatatgtacatatttaaatgtacatacacattttttttcttgcgaggaaattgttctccaaattagatgaaagacatcttttatttagacattttcctttcaacgtggggacaaaaaaaggaaactctactgagctcttgtttttatgtaataaatttgtttccattatttcccaattcttgaccaacactaagatgtctatgtttttctatgtatgttagtacaatttctaaaaaaaattgtctacaagtcttcaactaatttcttgtatgcattaatgatggtcatatttctacatccgaattcaaaaataaaaataaaacagagttaacagagagtgagtacttttaatcataaaaaacaaaaaactgtgcctgtcatgaggatcaaaaagattaatgtgactataacaaataacatcagctagttctgacatcctttagctgtatctcaccaatataattagacattttcattatcaagactcttctctgaatgaacacaatgcagataagtggcatctggaaactacatgagaaaatctgtggaatgtacatcaccatgcttggttcccttcttcaccaaataactcattaaaatatcattttggatacaattcctacagaatgccttacaaaaaccctatcttagtatatgggattcatatacatgtaacattttcttgagtatcattgttcatagcatgaatactgcttaatggtatatcaaatatttttcttttcataattctttatagacatcattttattagctgcataatactttatcacttgagtctagtataatttgcttagtgatttccatattacaggacacttgatttatataagatcatttacagtgtcattccaggtatcacaatcttttgattctagactaaggtttttcaccctaggcactaatgacatattgtgctgtataatcctttgttggggctatagggagggttatcctgtgcacggtacaatgttcagcagtatccctgacctctatccactagatctaagtagcacctcccccatggtgtgacaaccaaaagtttttaaacatcacccccgctgagaatcaatgttctatctagatcaatggatccaaacctcatgggtcacatacagttttgatagtcttatgaaatgatatactatttctccctctaaaacccacattgataaatttccatagtacttcaatacattatttcaagagctttgtggtccccaagaccatacgtggagttacaagaactcagattaagaatttcagtcctacattcttgacaaaaatagaaaaaaaaaaatcctaaaatgtgcatagaaccacaaaagacccaaatagccaaagcagtctggagcaaaaagaacaaagttggaggcatcaaactacctgacttcaatatatactacaaagctatagtaaccaaaacagcatgatactgacataaaaacagacacctagacaaacggaacagaatagagagccccagaataaatccatatgtttacaaccaactgatttttgagacaggtgccaagaacatacaataaggaaaagacagtctcttcaatacatactgttgtgaaaactggggagtcatacacagaagaatgaaattagacccttttctcaaaccattatacaaaaatcaactctaaatggattaaagatttaaatgtaagatcccaaactatgaaacaaatagaaaaaaacgtacggggaaagcttcatgacattgatctgggcaataatttttttttctagaaatgacttcaaaagcacaggcaataaaagcaaacatagacaaatgaaattacatcaagctaaaaaagcttctgcacagcaaagtgaagagactacctacagaatgagagaaaatatttgcagtcatgtatctaataaggggttaatatccaaaacgtgtgaggaactcaacagcaagaaaacaacccaattaaaaaatgggcaaaggacctgataaacacatctcaaaagacgacatataaatggctacagtatatgaaaaaatactcaacattactaatcatcagggaaatgaaaattaaacctacaataagatatcacctcatatgtgttggggtggctattgaaaagacataagttaacaaatgttggtgagaatgtagagaaatgtgaaccattgcacactgttggtgagaatgtaaagtgacacagacattatggaaaacagcatggaggttcctcaaaaaattagaaatagaaccaccatatgatccagcaatctactactggatatttatccaaaggaaatgaaatctgtataccaaagagacacctgcacacccatgtttattgcagcactattcacaatagccaagatatggaatcaatctaactgtctatcaatgaatggataaagaaaatgtggtatatatgcaggtatatatacacaatggaaaactagccataaaaaaagggaaatgctgtcattcgcaacaacatggatgaacctggagaaattcatattaagtaagccaagcacagaaaggcagatgatctcactcatcagtggaatctgaaaaatgttcatataggccaggtgcggtggctcacacttgtaatcccagcactttcgaaagcggaggcgaaggccgaggcaggcggatcacctaaggtccagagttcgagaccaccctggccaacatggcaaaaccctgtctctactaaaaatacaaaaataagctgggtgtggtggcatgcacctgtagtcccagctactcggaaggctggggcaggagaattacttgaacccgggaggcagaggttgcagtgaaccgagatcacgccactgcactccagcctgggcaacagagtaagacactctctctcaaaaaaagaaaacacttgatatcatagaattagagaagagaatggtgtttacaggtcgggggtaatgtgggtgagggagggaagatggtgttggctggggaaatgttggtcaaaggatataaaatttcaggaagataagagaaataagctcaagaaatctattacacaacaacgtatctactattaataactactattaataactattctgtagtgctaagagagtggatattaagtgttctcaccacaaaaatgataactatgtgaggtaatgcattgctaattagctagatttagtcattccacaatgtacatatactataaaacatcatgttgcacacgataaatacatacaattttatctgtcaatttaaaaagaacttctgtcctagatcatttgagcaactcactcattttcttactatgcaagcagcaatcacaatgaatcacatattcccaatgctcctgtcctatagaaagtcaagggaaatgacctaaaatgaccacacgaaaacaaaagctaaaacattaaacatttattattatatgcctagcactgctctaagaggttttagagtattaattcattctaatgttcattacaagcctgagaagaccagaaacggacagaacaaacattccaacccagatactctggatccactcccctattcttaaccgcaacagcgtactgcctctcacagttcacacaaatagcccaaaatgcaaccggaactgccgaatctcacagagatctggcaagtattacaattatcatctcatggactctcccgaaaaatcctgactctggttgataccaatttctgtgcaatcactttccgattcctgaaagcctcacagacgaatggaaatcacccaaccatctccattcttccctacttggaaaaggaggcctgtaaagagtcagaaacctggcgtgtgattccacaaactaatcttcttttcaaagcagagtctaaaataaagctttaatataaacctctggaggactatttttataccagcttagaagaagagagcgtacaggaaggtgtgaacgatttgccaaatggctctgtgaatattaaatggcaaggtggggagcgggcggggtggggaacggctcgctgggaggcggcacaatgggagggggcaagaatcaatttgcatattctcctgaaattcactaaaaatttacaggaacctctatattctaaaatcaaaaacgcatttcttgaacaaatacaaagcacaaactcacccttgacttaagtgtgcaacaataacgctctcatcctcctctcggtccttcttttggataataatacgactggagaaggatacggcaagcgtgagactccaggcttttcttggagcgcagactaagtttgaaagcaccctccatggccacaacttccctcacttcgtacgaaatgagaaggaaataaaaggaggaggaatcggtctgagttcgaagctggttcctggggacagatctctgagggacgctgggttctcaacatgtagctgccctcctgggggaccctcaagaggcacttccagctctcatattcccaccccgagtccagatctgcgccttcttgtgcaaagcttcattctcggttcaatatctaacctccctactggggacattttcattcctctgctgcagcctctgcagctttgaaggggaaagacggaggaagcagcaggagcctagtaccaccggcacagtgacactcacacagccccagcaaaacgcactgcgtccacacgccgtcccggtcctgtgcacagggcctcacgcacacactcacacagtcccctccgtcactcaagatcgcgcaatccccatcctttgatgcccgcgcacacgcacgcctaaggatctggcagattccgtctgcgccccgggttcctcctctgagcgcctcgctctcgcccacccgcactgccgggtcggtcaggttcgagtcccagtccacgaagacctcccgcagccaccgatttcttcctaggacgtgaagaccttacccagctaggtcgtcaaccccaggagacaggaagtggaaccgctaattccggtgcggtggcctctgggaaatacagtcctgagcagaaagaacctcagaagtcttggtctatggtctgttcaggttgatcccagcatacattgggggctcctaagggacccgagcctaatggatttgtgggagttccagaccgtggggtgcagaggttgcggccacgggcgagaatccccatctgagaggagcgttgctgttttcggtgcgtcagggtaaattaccttttctctctatgcaaaagaatgcaaatgagcagaacttttaaagaagaatttaaagtaaaattacgtcaaaatgtagctgctttgacctcttcgtctcagatccgagcataggcttcccctttgtgctatttgaagggacttaggataaatttgaaaagcctgaactaaagaaatggttggagagactccgtctcaaaaaaaaaaaaaaaaagaaagaaagaaagaaaaggaatcgttggttttatactagaagaggaagtgtggtttacatgagagatttcagaatcaaatatacttgattcttcaagacaatcttcctgttatctggagagaaaaacgtgattcaggacggcatggaaacagataaaagtacacagagaattacttgccttatcttgaaggatgaataattaacacattttcttaaaacagtctaaataaatgccaaagggggtttgtttttcgtaggaaaagcttgatttcactgttgtaatctagcaacattgaactttcaaaatgatttttgtagtttcctatgctatataaagcggaaacgtggaataatgaagagcaaaatgtcttttcattcccgactgtgacagaaaacagatagcaagataacaaacttaattggatcaatgatcacattaagtgtaactggtctaacaccttaacttaagaaggttgtcaggttggattttttttttaaaagtcagacccaaatacgtgctacctacaggtaatacttaaaatataaaagcactaataggttaaaagtaaaaggatggaaaaatatataaaatcctaacactagtcaaaagaaagctggagtggctatattaaaaacaaagtgacttcaccaaaaagactatatcagggataaagaaagttacatcatcataatgatgaaggatacagttcatccagtggaaagaacaaacctaaattatgctcttaatacagcttctaagtatgtgagtaaaaacctgttagatcaataaagtaacagacaaatccacaattataatcagatatttcaacatatctctcttggtaattgatagaactaatgcagaaaagcaacagggtatagattatctaaacaacatatcaacctgcttgatctcatttacacttctggaacactcttctcaaagacagtaaaattcatcttaggtggacaggagacactttccagcgtataccatattctgggccataaagcaagtctccataaatgagtaaatggactcaagtcatacaaagaatgtttttgacaaaaatggaattaaattagaaatcaataacagctcactatatattgtccaaagtagtaaaaatttgaaaatgtatgaatactatgataattgaaattatataatgtttgaaaatttcctttatgagtcataattttctgttatatcctaaagggtaaacaataacatatttgcattaaaacaaaataatgtttttgtagtaaggaaaaaattttaagctatctatattgactatgcattaaagagcagaataattatttttggtatatattccaatgctttaatcaatttcttagccagtatcaccatatttttaaggattttttttgacacagtctattatttttaaattttgataaaattgtatgtaatcctcaatgctggactttatggttaataaacttgaaattatagctaccttcaaatggcgcttctctgaacaccataccttttaaattgagatatatactctgcatatactaaggtaatcagaagtcttagaatatagccaatgaaatggaaaatatcctcatgagtattgtgaatatggaatattagattgcaaatattttagcagttgatgtattttgccttcacagtacatttctacttttttttttgccacttagtctaggaagggtacatttatttaaaaattattcctaaagccaaacaaattggctcaatttatgatacctttgaatgttaagccaaatttaggtgttacggaaacataaaccttctcaattgcattccattctaacacaaattgtaaatgtatccagttagaaatgggagcaccatcaaaagactactgccatagctgaagaaagtcctatgcaaaattgaagaatttcaaaattaaatcctgtatataatacgttagttcatgactttatttattcagtttcttccttaatttgtaggactaaatcccattgtcttcatgttggcaagttctgataactgaaattctgttgaatttctatactgaataggagtaaggatagatgatatcactgttttgtgccaaatcaacagaatcttaaacaaccaaagggttaaagaacaaataaaaagagaatttagaaaacattttagataaatacaaatttactaaagttcatgagatgcttactgctcagggaaaaatttatagctctacatgcctataaaaaggaggaaagatgtcaaatcaatgacctaactgtatacacttaggaattagaatatgaaaaatagaaaaaaaaaaaaagcaaaaccaggagaagaaaggaaataataaagataaaagtgaggttagattaaatagaaaatagaaaaataatagagaaaacttacaaaattaaaagctggttctttgaaaagatcaaaaaaagtggcaaaactgtagcaggactgaacaagaaaaaagagaaaacatcaaaattactaaagtcagagctgaaagtggagacattactaaacttacaaaaatgaaaatgatgatagaagaaaattataaacaattgtatgtcaacaaaataacctaaatggaaaggaaaaagtcctagaaacacacaaactatcactgactcaagaaaaaatagaaaatcttaacaggagtgatgtcagcaagatagaagaatgggactttccagcacttagctctcacagaaacatcaatttaaacgtatatctatgcatgaacaaactttcacaggagctaaagaatccaagtagctcactcagaggggatgggaatgaagcagctagtagacaactgtctctgagacagcaaaaatgttggatttagcaaagatctgaaagcagctattttaattatgttcaaagaactaaaacaagccatatgtaaagaatttaaagaagagtatgacaataataccctgccagagactatcgacagagagatggaaattattactgcaatgaaagaaccaagtagaaattctagagttgaaaagcacaataactgaaatgaaaaattcactagaagaactcatagcagatttaacctgaaaaaagaattagtgaacttgaaaataggtcaagtcaataaaattatgcagtctgaagaacagaaagaaaaacagaaggaataaaaatgaagaaagcatcagaggcatgtagtacaccatcaagcaaaccaacatacatataagaggagggtcagaaggaaagaaaaagaaaaaatgcttgaaaaataatggccaaactctctgtgaagttgatcacacacatgcacacacacctacatttacaagaatgtgaacacactccaagtgggataaacccagatattaatacttaatcaacatgtctcaaggagagctaccccagagtcaaattgtcagaagccaagaacaaagggaaatcttgaaaacagcaagggaaacattattcatcatataaacgagattctcaacaggactactggctgacttctcatcagaaacaacagagaacaaaaggcagtgggatgagattcaaagtactaaaacaaacaaaaacaaaaaacaaaacaaaacaaaacaaaaacaaataaaaccctaccagtcaaccaagaattctatatccagaatattctctctcaaaatatagataaaataaagagaattgcagataaggactgaaagcctttgttgctagcagactttcctaataagaaatattaaagttctttagaatgaaggtgatggtcactggaatccacacaaagaaataatgagcactgattaaagtcattacataggtaaataaaagataatatacacttttacttttttattttaactgattaaagataactgcataaaaccataattatacaattgtattattttgttcataatgtataaagttgtaatttgtgtcacattcatattactatgatagcacaaaggaagggagctatattggagtaaactttctgtatactattgatattattttatttattttgatttttaaaattttatttctaattttttgtagagacagggtctcactatattgcccaggctggtcgtgaactcctgggctcaggcaatccttccacctcagcctcccagagtgctgggattacaggtgtgagccaccatgcctgacgactactgttattattttagcaataatctcaattagatttttttaagctaagatatacattagttctttttaaaagctgaaaacagacggaaaacaaaaggatggaaaaagatacaaatagataccatacaaatggtgatcagaagagaataggaatggttatactaccatcagacaaaacaggctttcaaaatgttactaaagaaaaagagatttatttaatgataaaagggcaagttaattagaaaaatataactacaatgaacgtatatgctcctaaaaacaggagactacatacatgaaaggaaaactgacaaaactgaagagagaaaatgacagctcaacaatagaaggtggagattttaacactctattctcaatacatacaacaactagacagaaaatctgcaaggatatagaagacttaaacaacactacaaactagtttgtcttaactgatggttggttgaacactcaaccaacaataaaatacatactcaacatgcaacattttctaaactaaacaatatactagacttatatatggcaaatcataatattttttataagtaagtcatgctaagtatattctctgaccacagtgaaaataaaattagaaatcaaacactgaggaaatttgggaaatgtaaaaatattttgaaattattcaacacattgttaaataccccatggatcaaagaataaattataagagaaattaggatgtattttttattttacttcctaaaaatagagatgagaatctcactatgttgatcaggctggtctcaaactcctggcctcaagcaaccctcccatcttggcctcccaaaatgctgggattaccggcatgaaccatcgcaccttgcctagaatgtatttttaataaaaacaaaaacaatccaaatttttggagcagctaaatatgtttttatttttagctttaaatgcctatagtgctagaaaagaataaagatgtaaaatcatttggtagacttcaccagtgaaaccatgtagtctttggcttttctttgttaggaggtattagattgctattcattcttcttactggtcataggtatattcagattttctatttcttcattattgagtcttagaaaggtgtgtgtttctagaaacttttccattttgtctaggttatcaaatttattggaataccgttgtaaaaagtactcttgaataatgctttttattagtatacagttggtaggaatggaatgttccctgtttcatttctgatcctagttatttcagtcttcctctcttaatcaatctgcctaatggttctcaattttgttgagcttttcaaataaccaactcttagttttactaattttctctattttttattctctaatatgttaatctcaagcctaatattttcatttccttccttctactagcttcagatttagtttcttcttcttttctagtttctaatggcataaagttagggggctgacttgaaatctttcttcttttttaatgtaaacactaacagctataaaattcccttaacactgcttttgctgcatcccataaatttggtatgttgtgttttcattttcatttacctcattttcatttgttttgatttcttctttgatccactagtttagagtgtgcttagttttcatatacttgtggattttacagttttacttatgctattgaattctagtttcaatattttaacattatgacttcttctgtggcctaagacatagtttatcctggataataatccacatgcacttgaggaaaatgtgcactctgctattgttgagtggaaatgttatgtatatatgtgtgttaggtccaattggttcaagtcccctatttccttatttatcttctgtcctgttcctctacatattattaaaagtagtgtattgaagtctcctactattattgcatagatgtctatttcttccttcaattctgtcaatgtgtccttcatatattttggagctcaggtgtttagtgtatatgtatttgtaattgatatatcttcttggtaagttgacccttttattatatattctttgtctcttctaaccttttttaacttatagtatattttgtctgatattaatacagccatgcccactctttttaattgctgtttgcatgaaatatcttttttcttcttttcactttctttttgtttgttttttagacggagtctcgctctgtcacccaggctggagtgcagtgacacgatctcggctcactgcaagctccgcctcctgggttcacgccattctcctgcctcagcctcctaagtagctgggattacaggcgcccgccaccaagcccgactaagtttttgtattttcagtagagacggggtttctccatgttggtcaggttggtctaaaactcctgacctcaggtgatccgcccgcctcggcctcccaaagtgctgggattacaggcgtgagccactgcgcccggcccatcttttcactttcaaactatgtgtgtccttagatctaaagtgactttcttatagatagcatttagttggatctcgttcatttatcgtctcccaatctatgtcttttgattgccaagtttgatccgtttacatttaaagtaactattgataaggaatgacttatttttgccatgttgtttttttctatagttcacccagtcccacatttcttttcttactgccttcctctgtgttgattttctataataacacatttaaattttttattcattgtatttttgttattttcttaatggctgctgtagggtttattatatacatcttagaatcagcttcagaataatactaacttgatcccagtgagatatataaatgttatttatatagttctaatctatcctacttttcaattctattattgttctacattattatgtctacacatgctacagactcaaaaatacattattatacttattctgtataggtttatgtctattaaggatggaatagagtatatatatatttatatggtatttttgatatatagctttttatttactatttctacttctttttatttgttcctatgaattctagttactatcgcgtatcatttctttactccaatacaactctgctgtcatttacttcctttatgctgctattgtcaaatatattacatttccatgtcatatggccaataatacaattatgtacatattatacaattgctttttaaatctattaagagaaaaaagtaaaagaaatgtgcatttatgctgccttttataattaccattttgtgtgtgtgagacacagagtctcactttgctgcccaggctggagtgaagtggcatgatctcagctcactgtaacctctgcctcctggtttcaagcgattctcctgcctcaccttccgagtagttgggactacaggtgcacaccaccatgcccagataatttttgtatttttagtagagacggggttttgccatgttggccaggctggtcttgaactcccaacctcaggcaatctgcccgccttagcctctcaaagtgctgagataccaggcatgagccactatgcctggctataattacctttaattataaatattaattttgttctttttaaaaatgtgattttaaattttcatgtgttttacttgctttcagtattaataactttttttttttttttttacaatttctcatatggcagatctgggagggctttgtttcaccttttttttgaaggcagcattactagaaataagatcatggttcacaaagcttttgtcctttgagtactttgaatgtatcatcccactgccttcatcccctccattgtttctgatgagaagtttgctgttaatctattggggtacccttgtggcacattgtttttctcttacagctttcaacatttcctttcacttttaacatttttactatgacgtgtctgtttgtggatatgtttgcattcattctgttcacagtttgttgagatgcttgtgagtatagattaatgtttgttcaataaattgtggatgtttttagccattatttctttgaatatttttgtgcttctctttctcctcaccttatggtattctcattacatgtacactggtgcactgaaaggcgtcctgaatttctctgaggctctgtttatatttctttgttctattttctcatcctatttcttcattttcctattctattttctaatgggaagatggaattgaggttgcataatttctattgatctatttgaaagttttctaattcttctgccagctcaaacttatttagcccttctaatgattttttatattagttattatagtcttcaactccagaatttacatttggttcatcttatgatttcctttattgatattctttatttgatgagacattatctttgtattttcccttactgctgtgaatatatatataatggctaccttgaagtttttgtcttttaaatctgatatctgttccctgtcaaaggccatttctgttgcctgcttttttcctgtttataagtcgaacatttcagtttctttgtatgtcttacaatttcttgttgataagtggacatattaggtaacatactatagcgattctggatactgattccctgtccccttcttcagagtggtttttgttgttgttcttcagagtggttttgttgtttgttttgttttgttatttgttttctgctttgactaagctattttagtgaagtagcttgcagtgggaagcattttgttgttcttcagagggtgcagccttggacatatgcagagttactcgtagttatttgttttgtgttttcactaagctattttagtgaaatagctggcagtgggaagcattttgttgctcttcagagggtacagccttggacatacgcagaatataccctggtatggttttaaacaggagtctctttgaccatctttccctgatctctctgttaagatgtttgtctcctttggtattatttctagcccactaggctccactggcttctgtctgatcagtctactgttctccacaagtccttggagcattaattactaagcagtttggtataatttaagccaagcagggctagtttttgaggccagtctttaaggtttcttttgaccttagaagggctccttagctgtgtcttcccctggaattacctgattaactagctgacttacggttcatgttgtttttaattaagggaagtttctgacactgtttcaaataaattccattcttcttgagagagcttcagagctctattcttatacactgtctctccctctggacaaaatctctgaaccaccattctgggcaatgggctgggtggtagccattttgtttctcttgtgaaacctctgccttacaagcaagctgaggcaaaggcaatcagggcccaaatctgagttcactgtgcctgggtagagcttccaacctatgggtgggagcgggggaagcaatggagccccaagcctcttggttgcatcaccaggaatttagcctcttcaactgagaggaggtgggaataagaatccctggaagcctgaccctcctgttgttataaaacttgattgagagctggagccgcataatcttggcagcatccacccagtgtgaagcttccatcaaactgagctgtgaagacaagaagagagtgggctgtgtcttaaataccacgaattctcactgctcttaccaagttttagtagactttgttgttagatatttcattcactgtatactctttgcactctttcagatctcaaatagtaaggttttaaaaatagtttttgttttttgtttttttttcacttttacttgtcttgctggtaaatgagcctgcagagtctccctatcctatcatccagaagtggaacttcatacagtcatctaacaatcgtttagcattttctgtcatctcattttggagaatcatagatgtggcagaaatacatattcttgaagaaaaaaaatgtctcccttacaggtactgtggttttaatagggtgtgggataagtacatgacaacatgcatgggatagatgctctgctctctgcagatctgtgcttttgagctacagaacatagaagaatatattgactgttcttagtcttaatatatgacaatctaggtgtatcatttaagattaaatttggttgtgagtaaaatagtaaaactgcatcaaattaaagtggataaaacaagataaggttaatttctctgtcatataatatggatgtaagcctgatattgtggccttgctccaaaccaatcatgaattcttccactgctggcatcagaatggtatgagctctcagacttacacagaactggggaaaatcgtaaagaatttctggatatccctcacccagatttctcaaatattaatatattcagccagctgtgttttaagagaggtttccagaactgccaaaaatattcacttacatcctactggccataagttatgtcacatgacaacatcttggaaaaataaatgcagtgcttactctagatagtcatagccaactgttaataaaaattactgattctataatcctggactctaatctgtaataacagactctgacccgctggggaatccaaggagaaagtttcactttcagcaattacaaataaccacagtgcaaccctagagaccacacttgtgcagaagactcatagaaatggaatggtatcctagaaattagaacacacaggtctctcatcccccatactgcaaactggattatcataataccctataaaaggatgacagaaggccaggcttggtggctcacgcctgtaatcccagcactttgggaggccgagacaggcggatcacgaggtcaggagatcgagaccatcctggctaacacggtgaaaccccgtctctacttaaaaaaaaaaaaaaatacaaaaaaaattagctgggcatggtggcgggcgcctgtagtcccagctactcgggaggctgaggcaggagaatggtgtgaacccaggaggcggagcttgcagtgagccgagattgcgccactgcactccagcctgggcgagagagtgagactctgtctcaaaaaaaaaaaaaaaaaaggatgacagaaatcttctgtccagtttttttctggagaatctatgaacattcaaaatattatctattgtcggctgggcaagatgtctcacacctgtaatcccagcactttggggtctgaggcgggcggatcacttgaggttaggagttcatgaccagcctggccaacatgctgaaagctgtctctactaaaaacacaaaaattagctgggcgtggtgacaggcatctgtaatcccagctacttgggaggctaaggcaggagaatcgcttgaacctgggaggcagaggttgtggtgagccacgactgcaccattgcactccagcctgggcaacaaaagcaaaactccatctcaaatataaatctatccatctatctatctatctatctatctattatccattattgaatgttcttcataacactgctcagaaacaccatgacaaatttgaatcagaccaatatctccaaaaatgggcaagcagattaatgtgtcatttcaggcaggccctagcaggagataaacttctcagctatcaccatacataaaaccttataattcaataaaatatcaaatgcaaacaagagcagatcatagaaatgtaagttgagaaaaatcagagtgaacttctgaccttacaatgacattttctactctgaaactattaaaagaattctaacaaaaccagcatcttcttccatacctgtaactgccatgtgcacccatagcagccagatttcttggtctcaaaggctcttttcctctaaatagaaccaggacaccctacgagggtactgaatcatgggttgattccatgactcaggacaagaggcatggggaacatggaccaacaaagaaggatcagtctaaaacatcttcttaggacctgaacacaatattcatttaaaaaaaaagaaaaaaagaagtcaaaaaaacaaatgtaactggactcctactggctacacatcaaattatcataattactacagatgcttctcaacttatgacagcgttatatccaaataaacccatcacaaattgaaaacatcatatgccaaatgtgtatttatgacctacaatattttcaacttaacatagccccatcttagtttgaggagcatactctgactgagtatgtcttagtccattttgtattgctacaaaagaatatctgaggctgggtgattaataaagaggtttatttggctcactgttctgcagaatgtacaagaatcatggtgcagcatctgcttctgctaagggtctcaggctgcttccactcatggcagatgatgaagggagagccagtgtatgcagacatcacatggcaagagagaaaacaagagggtgagggaggaggtgccaggttcttttgaacaaccagctctcacaaaaattaacagagcgatagctcactcacccctcaatccagagagggcattaatttattcatgagggatcttccaccatgacccaaacaccttccattaggccccacctccaacactgagatcaaacttcaacatgagatttggagggacaaatatccaaactatagcaacatatcacttttgtaccatcataaagctgagaaattgttagttgacattgttggggaccatctctataatagttcattggaacaagtctgttaaaaatcatgttcatactgatacacaaaacatgtaattatcatacatctagtatcatgtcacactcaaaagataaatggttataaattttacaaaaggaggctgcagttaggaatgtttaatttactgtttgttgatagtaggtgagaaagaactgttcatatgccttttttccaccaacttgatgtttgtttagaaggtatagttacctatttgtattgatctgtaaaagcaagatggaacaaatacagaaaagtttgagtaagccagacacttttggaaggggcagtgtactagaaatgggaaaaatgtatccatattaacggctactcgtaactcctatgaatcaggtaaaaggagggccaaataaaaatcagtgctagggagtgaaggtcagactcacaaaccaaataaatgaaatattcaatacatttcacaataagaaaataccccaatgtcctaatgaaaaagaataaaaacacatactcgatcctcttctcctaggagatgaaatatattgttttaaaaatgagttactccaataagatatgaataagcaatatataaatatataataaacataacagaccagttagatatataatagacaacagattaaatactgctgactaagcacaacttaaggggattatataattaaatgtatccaaaaaaaccattattgaattgacctgtcactttctaatacatctttgttactaaaaatttaagcaacttagtaaccatgactctgggtcatctgatatcataatgtggttcaaggtccaccaatcttctgtttctttgattgtatttccttgtttcaggacaggtaaaaatgttaatatcataataaagaccaaactgtccaattaccaaaactgtgaagcagcaacaatgtcaaagaattacaaataaaaggaataagaattttttgaaaagcaactaaaattgagaaaattctttttataagtgaattcagtatgttcactgagcttgtaagcaaggaaatagtctatggatgccttctctgcttttaaaagtagtaggtgatttttaaatttttacataattggtttgtaactttagcaaatattttaaagtgttttattatgtttgcaaagggactgtgacttccaacttagaaatcccaagattgcatgatgatagagtttcactggaaggcctcctgggatctcttttttatgacaattcttaatgagataccagaatgtgcaatgacccataaaggagttgtgctgggttaatacccagggaatctgttgagttcaaaaaagaaagtcaaagagaatcaatatgaaaaagatgaaagtggaaataaaaaataggaacatgagactagaaagccaggttttaaatagcctcgttttgtaagatttataagatcactgcattaacaaaacctgaaaaatgtttagaaaattataactttacctatgattatagatacaattaaatgttaagaaatagaattaagtagtctatcaaaagcataataatctgataaggatatattcacaaaaagaagaaagctatcaatataaattatcattttatagatttttaaatgcactggaataaaatcacaaaggattattattgatctttaaaaaagttaatctctctaattcatgatgccacaatggtatcatgttttatagcttgatttaaaggcttaatttttttcaaagtttatcaacagctcacataccagccatgatgtataggtgctgatgataaatgctgaacaaaaacaaggttccagacaaaataatcttggctccctgaataaactagagggtgctaattttgtactgaatatactgtcagccttatcacacaagttgacttatgttgacaaccttaatggcattcatttttgaatagtctatttcaattttcattttgtattcaatccacagctaaaatacacatgattataaatattcagaggtcaaagtctctccatagattatttatgcactacaaattagatctttacaatggacttatggcggttaccagcttacccaaatgatcaaacttagtttcactaatgcaaggacctgtacttaaatgttttctgacagtgaaatatgccatacaaatagcctacaaagtattcttccccaaaatgtttaatctgacctaacagagcctctggactcaaattcccttgtacagaatatgcaacaaagagaacaacactaaatgacactataaagaaagaaatctaaacacatagacaattttcctgggctaatcaaaattcaatctcattttttaagaatgaggagatggaccaggccttttcaaaactatcaagcagatagtcagggcctgtgaagtgtgccaaagaaataatcccctgcactgcaggccatacatttcaatctctgtatctttaacctccttgttaagtttgtcttttccagaatcgaagctgtaaagccacaactcattcttcaaatggagccccagatgcagtccatgactaaaatctaccgcggacccctggaccggcctgctagcccatgctccaatgttaatgacatcgaaggcacccctccagaggaaatctcaactgcacaacccctactacaccccaattcagcaggaagcaattagagcagttgttggccaacctccccaacagcacttgggttttcctgttgagagggggtactgagaaacaggactagcaggatttcctaggccgattaagaatccctaagcctagatgggaagttgaccacatccacctttaaacacggggcttgcaactcagctcacacccgacccatcaggtaagaaagagagcccgctaaaatgctaattaggcaaaaacaggaggtaaagaaatagccaatcatctattgcctgagagcacagcgggagggacaatgatcaggatataaacccaggcattcgagccggcaacgactaccctctttgggtcccctccctttgtatgggagctctgttttcactctattaaatcttgcaactgcaaaaaaaaaaaaaaaaagaagaatgaggagaaaggagaaatgttctaggtcagtggctctctaactctggttggtatcacaatcacctggagaaataataaaaaacatagaggcccagaattataagctagggcttaagcctctgtagctttactaagtgccactgttgattctaatacctaccaaaatttgagcgcctacattcataggatttccaggctacaatacactaaagagagataaccaaatgcaatgcagattctgcaatggattctcctttgaatatgaatagctgtaaaagatggtttggaagccaatgaagaaatctgaaaatggaatgatattacagaattatgaatactttccttaacggtaattatggtacaatggctatatgatattgtctatattgtcttcatgtttggttgatacacacgttgattaaataaagggtaaagtgtcatgatgtctaaaacttattctcaatggtacaacaaatatacaaaaaataaacgtgcaaattgttaacaattttgaatctaggttggggtatatgattgtatatttgactattctttcaaaacccacaacaagtatcaactaggtttaccatcttttatgggcagaatttgtggtatcccaaagcaattacaatagcaacatcaaaaatcactggtcattgatcaccatgatagatatataacaatgaaatagtttgaaatattctgagaattaccaaaatgtgacataaagacatgaaatgcacacctgacgttgggaaaatggacctgatcgtcttgctcaccacagggttgccacaaaccttcagtttgtataaaacacaataactgcaatgcacaattcagcgaggtatgcctgtatctggtaaattatttcatagggagtacattgtgaacatgacaactaccctatattcctcattcaaagactttctcacaagaattatcttctccgaactctaaggtatttagtgtggctataaaacgccccacattccttacactcaaagatttctcagaagtatgaatactcagaagttgagcaaatcccaggccatgatgaaagttcttcacacattcttttatgttcacaagatttctcatcaatatgagctctctggtgttgagtaaatttttcgtacacagtgaaggcttgtccacactccttattgtcacaaaatttctaactattctgaattttctgatgttgagacagctgatcatccacagcaaatgctttcccatattccttacattatagcgtttctcaccagtatgaattttaacatgttgaacaatgtttgagctacaactaaaggtcttcccacattctgtacattcacagggtttcataccagtatgaattctttgatgtgcagtcaggaccaaactaaatctgaaagttttcccacactccttacattcatagagtttctcaccagtatgaatactctgatgttgaacaaggtttgagccactattgaaggccttcccacatttctcaaattcaaatggcttctcgccagtatgaatgacctgaagtccagcaagctgtgtcagaaaactgaaggcctttccacattctttacattcaaagggttttttaccagtgtgaatttggtaatgttaaataagtggtaatgatatctaaaggtcgtcctccactccttgcatacaaagagtttctcactggaatgaattttctgatgctgaataacgtttgaaccacaaatgaagcctttcccacaccccttacattcacatggttttacaccagcacgaatactctgatgttgaacatggtttgagacacgattaaaggactttccacattccttacattcaagatgccttctcacctgtgtgaatgttcttatggcgattaagctgggtgggaagactaaaaacctttccacattccttacattcaaagggtttctcaccagtatgcaatttctgatgtcgaataagttgcatatgaagtcgaaaggctttcccacactccttacattcaaagggtttctcaccagtatgcaatttctgatgtcgaataaggtgcatatgaagtcgaaaggctttcccacattccttacattcaaagggtttctttccagtatgaatacttcgatgttgattaagatttgaaccacgacgaaagaatttcccacattccttacattcaaatggtttttcacctgtgtgagttttctgatgttgggaaagttgtaggtaaagtctaaaagccttcccacactccttacattcatagggcttctcaccagtgtgaatactctgatgttgaacaaggcttgagccacgattgaaggccttcccacagtcttgacattcaaatggcttgtcaccagtatgaattcgagaatgttcaataagttggcaatgatatctaaaggccatctcacattccctacatacaaaaggtttctcattggaatgaattttctgatgctgaataaggtgtgcaccacgattaaagcctttcccacactccttacattcatatggttttataccagcatgaatactctgatgttgaacaaggtttgagctacgattaaaggacttcccacattccttacattcaaacggtttttcacctgtgtgaatgttcttatggcgattaagctggttgagaagactaaaggccttcccacattccctgcattcaaagggtttctcaccagtatgaatcttctgatgtcgaacaagctttgtcagaagagtaaacgcctttccacattctttacattcaaagggtttctcaccagtatgaatttggcaatgttcaataagttggtaatgatatcgaaaggccatcccacattccttacatacaaagggtttctcattggaatgaattttctgatgctgaataaggtgtgcaccacgattaaagcctttcccacactccttacattcatatggttttacaccagaatgaatactctgatgttgaacaaggtttgagctacgattaaaggacttcccacattccttacattcaaacagtttctcacctgtgtgaatgttcttatggcgattaagcagggtaagaagactaaaggcctttccacattcgttacattcaaaaggtttctcaccagtatgaaatttctgatgtcgagtaaattgtatgtgaagtcgaaaggctttcccacactccttacattcaaagggtttctctccagtatgaatactctgatgctgaataagatttgcactacgactaaagtatttcccacattccttacattcatacggtttatgtgtattgcaaataagagaagcatgaggagtatgagtaggcagtttttcatagctgatcatcttttgattgatatttccttcttgatatccctgtagtccctcaaattgtctatattctgagtcatttctaaaataaaaggcctcaatgccaagagttgtacttatttgctttataacctgtttgggtaaatttacttcagaggtatcattttctggagatactttctcaggtccatattttaactccaaatctgaaagaaatgaagaaagcaaacctattttattttcgtataacacacatgcatacaaagtccttttgtcaactgaaaccatcaattcaaaccaataaaacctttattgattttattagccaaaaccaacaaagttggtagatagaacctttctcatatcacttctgtttccagtggaagcaaatgcacatctgagccagcctggttatgtacatgtaaaaataggaaaatgaaccacagaagattgaacctaactaggtcaactatctgttgaaacatattgatatgttctataggacttaagaccatgagacccatagtttcatagtcagtaattagaatgtccaggatacaatccaaatatactggcatatacaagaaaatttcaactcacattggaaaagaaaatcaacagcagcattctgccaggggcctggggatcaccccacccctgcttaccacaagaaccagcacgtacaactggggggcctaaggtcaggtccagcagacccagctctgtgcccaagtccccaagcacaccatctggggacctggggatcaccctgatccatctaccacctttgctacctaagcactcatcacagaggcctaaggtcagacacatacaacctgctgtttcctccacaactggtacccacctgtactcacaaccggaagttctggggactggcccacccagcccatcatagtcacctccaacactaagcacttactgcttgggagccagaaggttgtcctgttcactactactaccatcacccatgccacacttgctgcccaagaatccaagaacccatccacctacccagcataccactaccactgccagcactatccaaactacgaggaggccaaagaatcaacgtgcctagacacactaatactagtaccagcatacactatgctggggccccaaaacaggcacatctggactgccactgccaccaccagagcccaaggacttgcctaccttgtgtcctcgtgctaggccattcttgcattaaaggaatacctgagactgggtaatttacgaaaaaatgagtattaactggctcatggttctgcaggttgtacatggcgctagcatcttctcagcttctggggaggctttaggggccttttactcataaaagaaggcaacacaggacaaagaatgtcacacagcaagagaaggaacaagagagagaacaagaagaagtgccatatacttttaaacaaccaggtcttgcaagaactcacttactattgtgaggacagcaccaaggggatggtgctaagccattcatgagaaatccacccctatgatccaattacctcccaccaggccccatctccaacactggggattacatttcaacatgagatttagaggggaaaatatctaaactatatcactcctcatccccaataaaacttcaccataccctccactaaccatcacaaccaaagccaaggaagaaatcacagacaccaaaggcactgtttacagccaaaaaaaaaatcataacactacataacaacactactgcacacgcccagaatcaaagcgaaaatgccctatccaaccctattaaccataggtacatctttaggaaaaaagcctcccctacaaaagcaaattcaaaaaaatgagaataaacacaggaaataacaaaaaaaaaaaaaagagaaggaaacttgacatctccacaggaacataataattctccagaaacattccaatgggagaaaaatgctatatcctagcaaaagaattcaaaataattatattaaagaagctaagtgagatacaagagaattcggaagaacaatacaaacaaatcagaaaaaaaaaactcaggataagaagaagaaacttaccaatttcattataaaaaagaaccaaacagaaattctgaaactgaataattcattgaataaaatataaaatacattcaaaatcttcaacaacagactagatcaagtagaagaatctcagaacataaagccaattcttttgaaataacccagtcagacaaaaatagaaaaacaaaaaaagaagaagaaacaaagaccctatatgggacatcataaaacaaccaaatatttgaaattttgaggtcccagagatgaagagaaaaaataaaggaaagaaaatctatttaatgaaataacagctggcaactttccaattctagcaagagatgtagacatccagatacaggaagctcagagatacccaaatacataacaacacaaaaaggtcttctccatggcacattatggtcaaaatataaaagtcaaagacaaagagagaatactaaaaacaggaagagaaaagcatctagtcacttacaagggaactctcattagccgaacagcagatttctcaacagaaagaaatgagagagaatgaaatggtatattcaaaatgttgaaagaaaaaacttgccagtcaaggatactatcctcagcaaattataaaacataaatgaagaagaaataatctttcccaggcaaaagctgagggcagaccagctctacaagatatgcttaagagtcctacacctagaagtgaaagaatatctgccattgtgaaaacacacaaaattataaaacccactgacacagcaaacacaaataagcagaaagaacccaaatgttacccctatagaaaacaaccaaaccacaatgatgaaaaataaaagagaaagaaaggaacaaaggatacacaaatcaactagaaatcaattaataaaatgacaagaataagccctcacatatcagtaatcacattgaacgtaaatggattaaacttttcatctaaaagatatagatggaatggattttttaaaaagtgacccaattatatgctgccaacagactcatctcactggtaaagacatatatggattgaaagtaaaggaatggtaaaagatattccatgcaaatggaaaccaaaagtgagcaggaatagctatatttatatcagacaaaaaagattttaagtcaaaagcagcaaaaaagagacaaagaagatcactgtataatgataaagggatcaattcagcaagcggatataacaattctaaacatactataatcccaacaccagaacacccagatatataaggtgaatattattagatcaaaagggagagagatgtattccagtgcaataatcattggggatttcaacaccccactctgaattacacagatcatctagatagaaaattaacaagaaacattggatttaaacttcacattagacaaaacaggcctaacagacatttactgaacatttcatcaaatagctacaaaatacacattttctcattagcacacagaacattctctaggatagaccatatgttaggatgcaattcttaacaaattcttcaaaaccaaaattatatcaagtcttttctcagacatggaatagaatgagaaatcagtaacaagaggaactttggaaactgtacaacacatgaaaattaaacaacctgctcctatataaccactgggtcaagaaagaacataaggaggaaattaaaaaatttcttgaaacaaatgaaaatcagaatacaacataccaaaacctatgggatacagcaaaagtactgctaagagcaaagttgatggcaataaacacctacattgaaaaagcagaaagatttcaaataaacgatctaatgaaattagggcagaactaaataaaatacaggctaaataatacaaaagatcaatgaaatgaaaggttgttttttaaaaaacataaataaaattaataaaccactagctagactaaccaagaagaaaagagaagaaataagcaaaatcagaaataaaaaaaggagatattaccactgacaccacagaaacagaaaagatcatcaaaatagaaaagctgaacaggccaatgagtaatgagattgaattagtaataaaatgtcacccaaaaaagaaaactccaggactgatggcttcactgctgaattctatctaccaaactctcaaagaactaattctcctcaaactattccaaaaaatttcagagaagggaattctccttaactctttctatggagctggcataccatgaaaccaaaaccagacaaggaagaaacaaaaaaagaaaatagttctagcctaaagtcacatgaatgcctatgtttattgtagcactattcataatagcaaagacatggaatcaacctaaatgtccatcaatggttacctggataaagaaaatgtggtacatatacaccaaggaatactatgcaaccataaaaaagaacaagattatgtgcagcaatatggatggcattggatgccattatcctaagcaaattaattaaggaacagaaaaccaaatactacatattctcacttataaatgggagctaaacaccgagtacacatggacacaaagaacagaaaaacagacatcagggcctacttgagagtagagggtgggaggacgaagatccaaaaactacctattgggtactatgcttattaccggggtggtgaaataatctgcacaccaaacccaccacaacatgcaatttacccatataaaaaacccacttatgtaccccttggacctaaaataaaagttggaaaataaattaaaaataaataaataaatggtgctggaaaactggatatccgtatgtgatagaatgaaaccagacccctatttctcaccgtatacaaaaatcaactggaaatggattaaagacttaaatgtaagactcaaaactataaaacaactaaaagaaaacataaaggaagtgcttcaggacattgacctaggcaaaaattttctggttaacactgcaaaagcataggcggcaaaaacaaaaatagacaaatgggactatattaaactaaacgcttctgcagagcaaaggaaactatcatcggagggaatagacaaaattaaatgagagaaattatttgcaaactatttctctgacaagagactcaaataacaggaaaaaaaaaaaaaatccaattaaaaagttggcaaatgggctgggcacgatggctcacacctgtaatcccagggctttgggaggccgaggcgggcagatcatctgaggtcaggagttcaggaacaacctggccaacatggtgaaaccccatctctactaaaaatacaaaaattagccaggtgtggaggtgggcacccgtcatcccagctacttgagaagctgaggcatgagaattgcttgaacccaacagacagaggttgcagtgagccaagatcagattactgcactccacactgcaggacagagcaagattccaccttaaaaaaaaaaaaaaagtttaccctgggaaaaaaagagggaacttactccactaaaaggggaaggaaataagagaacagaaattaggtgattagtaaatgatgaagttccttggtgatggcttctgctgtaatctttatttccttcccaggtcttgggcatttttatccaacaggacttgggtcactgaagaaagcttttcaaaccacatctcaagtgtatgactcctttctgagcacatgtccaggacaatgatggcttccccccgcctgctttaccctcacttacctggataccgtctgcttgtttctttccttacaaccatccagggctctttctcttgctctagtaacgtaattacatctggtttagaaatggaacttcctgcttaaaagaaacgacacatgtagaatttttttaatacagatttttttttttcaaatctttgtgacctgcttaaacttacaataaattacaagtcaaaacaatattgaaaagagacttcagataagagtgagaggttgagtaagagaactcttttctaactatgttagaaaaggacttcctttcatttaaactcagaatcttatcccttgaaaagaggtataactgaatggttgagagcaggaaacttcaatccagactgccaggttcaaatcctatctctgctactcactagcagtatgacctcaggtaagtcacttaaactctgtccttcagttttcccaactctaaaatggggatgatacaatacctattttataggattgatactaagacaaaataagttatatatatgcaaaatacttctaacattgcctgatgtacagtagcacaaagtcaagaattattgtttattattgtcatttattttgcatccttagacatttatagctcactcagtatattcactaaatgaaaatacataaactccatggtctgaaactttcaactgcaaaacaatggaatgtttattgaaggaaatgaaatgcattccctttagtgttaaatgaatttctgtcaacccaatcagtatacgtaaataacagacatttttgtttgtttgtttttggttttgagacagggtctcggtctattgcccaggctggagtgcagtgatgggtacagctcactgcagcctcaacctcccagtgatcatagaggtttctctgatagaaaaattcaagacactcttctccttacagatgggttagaaaaacaaaaacaaaccaacaaacagaaaatctacagtaattctgagatcaaacataatatgaaatctggttcttagacaatatctttcaatgaatgtacaagatttcaaattcagccccatggtcatgaagagagaggcaattacagagaggaccagcgtaacgaaggaggccattgtggagtaggcaagatgcaggggctccagggaggtgcctgttttcaacccaacaaatcccaatccattcctttgggaacaagaagaaggaattcagccacctcttaaaagatagccctgaaattcacggtgaagaaagctgatattccagaaaatagatataaaaatagctgggactcaacgaccttacccagtgagatcaggtggctgtagttctccaacatcacatccctgtacaaggtcctctgatcaggctgcaggcactcccactcctcctgagagaagtcaatggccacatccctgaatgtcactgatccctgaaaccacaaacacatgtataatggtgaaactgaagaaagttgttttaagatgaaaggagaggaagtgaaggagtgtagtgtaagaaaaaagcaatatggaaattcacagagtgcctgcacattcttcaagaagtctcctgctggctgagtatggtggcttatgcctatagtcccagcactttgggaggcagagataggaggattgcttgagcctagaaatttgagaccagcctgggcaacataatgatatcccatctctgcaaaaattaaataagtaactgtgtgtggtatcacgtacctgtagtcccagctactcgggaggctgaggtaggagtattgcttgagcccaggagttcaaggctatagtgaactgtgatcacgccactgcactccagcctgggccacagagcaagactctgtctcagagaaaaaaaaaaaaaaaaaaaaaggtggcatacaattaaagaatgttcttaatcctcaagttcattatggtatgagatgacagcaaaagtattttttcttgtcatgacaactgatttttataagctgcattaaagtcaatagaactcacatattagatttattcattttttttctatttatacgttgaggatggccagggcctctaaggatttccccaattctgagaattttttattttttattttttttctgagacagaatttcactctgttacccaggctggagtgcagtggcacgatcgcagctcactgcaacctccacctcccaggttcaagcgattctcctgcctcagcctcctgtgcagctgggattacaggtgcgcaccaccacaacaggctaatttttttttttctttttttagaagagatggggtttcaccatgttggccaggctggtctcaaactcctgacctcaagtgatccaccacccacctcggcctcccaaagtgctgggattgcacgcgtgagccaccatgtccagccagagaatctgtaatcacctatcattcatgccctgaattatcttctccctgctactgcccactgtcctcacctatcattttcctaaaagcctcataaagcagatcaccttgtcacacttgcagactgaggctactcactatggaattctaccttagctacctggaaagctctagtctgtaaagtttcaaagtgttcccaagtgtggtcaatcatctgtaacttatcaaacccataagaccctgtttccctgtggggactgattcctccactgttccaatattcttcctgaccaaggtctgagcacagagcacagactgaataactttttcaaagaaaacatcaaagccagtaggaaacagaggtacaaataggaagagcagtgactttttttttttttgtcaccaaccttcactgtaatgggacaaactggggtgtaagatcgtgaattctaggtacgaagcttcaggttaaataataacagtcacctaacctgaaagtcaccatatttcaaggaaaagagagaaatacaaacttacatggaccatgttgctagaattacaaaactggtcaatcttcctcgggcttctcccctggaaaacaacaacaacaaaaaggccacaattaaagctgtgtctcaaaagcaaataactattttatcctccgttcctatttctcaactactcctgctaacacgcacacttccacccttctcccatcactccccttgcccccacacacactctctcacaaatagctggcagtgaacgggtggagtagggatgaaaccaagctctcgcctgcatcccagggaacctgcggcagaagcatgaatgccgagcacaggcatttctgccttgaagttgtggcttccagccagtcctccattcttgggatacctatcttggcctaggtctggacctctgatcctgcccttagcagatcctcctcccccagtcccacctttcagagctgagaagggattgcatcatccaaaccagaacctctttgtgaaatcaggattgggtgcagtgggggaaggcatgagaactggaaagcatatttgcactggcagtgtttgcaccaaattgcactgacagtgttcagcattctaaattcagcaaaagccagttggttaatacagttcagaacatccacttaatagaatacaaagtaaatattaaacgttcaagatatatgattaacagaaaaatcaggttacaaaacaggatagataatatgattacatttgtaaaatatatgtatatagaaatactaataaaaagactaacagacattaatagaaaaaaatttagaaaattatatacatgttaagagttctcctctgtgtattgtagctccaattttcttctttttgcttaagagcatttcatggccgggcacggtggctcacacttgtaatcccagcactttgggaggctgaggcaggcagatcacgaggtcaggagatcgagaccaacctggccaacatggtgatacctcgtctctactaaaaatacaaaaattagctgggtgtggtggtgcatgcctataatcccagctactcaggaggctgaggcatgagaatcgcttgaacccaggaggcggaggttgcagtaagctgagatcgtgccactgcactccagcctggcaacagagcgagccttcatataaaaaaaaattgtaactacatccaagcattaacttggaatatatatagttatattcacacacacacacacgtgtgtgtatatatatatgtgtgtgtgtatatatatatttatatatatatatgtgtgtgtgtgtgtgtatgcatctctatatatggacatatataaatgtacatacacatttctttcctatgaggaaacttctccaaattagatgaaagacactttttatttagatatctccctttgaacttggggtgggaaatcagcatactctaatgaactgttgtttttacttaacaagtttgtttcctttattttccaattcttgaccaacactaagatgtctatgtttttctatgtatgttggagcaatctctagaaaaaattgtctacaagtccccaaccaatgtcttgtatgcattaatgatagtctatttctacttttgaagtaaaaaataaaaacagagttatcaggaaaaaaacctgagcctgtcacgagattcaacaaaagaggttaaagtgactacaacaaataacatcagctagttctaatatcctttagctgtatctcaccaatataattagatattctcattatcaagattcttctttgaatgaacacaatgcagataagtggcatttgcaaactatgtgagaaaatttgtgaaatatacaccaccatgcttggttcccttcttcaccaaataaccaattaaaatattattttagatataattcttatagaatgccttcagatagaattcttatagaattcttatacaaaaaccctatcttagtatatgggattcatataaaacataacaatttctttttggggggcaggggtggagtctcactctgtcacccaggctggagtgctgtggcctgatctcggctcactgcaacctcagcctcccaggttcaaacaattctcctgcctcagcctcctgagtagctgggattataggcgcctgccaccactcccggctagtttttatatttttagtagagacaaggtttcaccacgttggcaaggctggtctcaaactcctgacctcaaatgatctgcctgcctcagcctcctaaagtgctgggatttcaggtgtgagccaccgcgccccgccccatgtaacattttcttgagtattattgttcatagcatgaatattgcttaatgatatatcaaatatttttcttttcataattccttatagacatcattttattacctgtgtaatactctatcacttgagtctagtatgattagcttaatgatttctgtattataggacacttattttatacaagatcatttacaatgtcattccagatatcacaatcttttgattctggactacagtttttcaccctaggcactactgacatattgtgctggataattcttagatgggagagtggggagagctatcctgtgcataacacaatgtttagcagcattcctgacctctatccattagatctaagtagcaccctccccgacagcatgacaaccgaaagtttctaaacatcaccccagctgagaaccaatgttctatctagatcaatggatccaaacctcatgggtcacataaatttttttgataatcttatgaaatgatacactatttctccccctaaaacccacatttataaatttctataatacttcaatattttatttcaagagcttttggtccctgagaccataaatggagtcacaggaactcaggttaagaatttctgtcctacattccttacagaaacaggaaaaaaacaaaaatgctaaaatttgtatagaaccacaaaagacccaaatagccaaagcaatcttgagcaaaaggaacaaagttggactcatcaaaactatctgacttcaagatatactacaaagctatagtaaccaaaacaacaaggtactgacataaaaacagacacatagaccaaagaaacagaatagagaggcccagaataaatccatatatttataaccaaccgagttttgaggagggtaccaagaacatacaatggggaaaagagagactcttcaaaaaatactgttgtgaaaagtaggtatccatatgcagaaaaatgaaattagacccttatctcaaaccattatacaaacatcaactctaaacagattaaagacttaaatgtaagatcctaaactatgaaacaaatagaagaaaacatagggggaaagctctgtgaaactgatctgagcaatgattttttttgggatatgacctcaaaagcacaggtaacaaaagcaaaaatgaacgaatgaaattatgtcaagctaaaaagcttctgcacagaaaaggaaacaatcaacaaagtgaagagacatcttgtagaatgagagaaaatatttgcaaccatatatatgataagagattaagatccaaaatgtatgcagaagtcaaacaactcaacagcaaaaaaaaacctgattaaaagatgggcaaaggacctgaacaggcacatcccaaaagaagacatataaatggccaacagtttatgaaaaaatactcaacatcactaatcatcagggaaatgaaaattaaacccgcaataagatattagctcatacctgttagggtggctactggaaagacaaatgttaacaagtattggcaagaaaaggggaacgcttacacactgtgggtgagaatgtaaatgggcacagccattatggaaaacagtatggaggttcctcaaaaaattagaaatagaactaccatatgatccagccatcccactactgggaatatatctccaaaggaaatgaaatctgtatgtcaaagagatatcagcatacccatgtttattgcagcattattcacaatagccaagatatggcatcaacctacgcgtctaacaatgaataaatggataaagaaaatgtggtatatatgcaggtatatttacacaagggaatactatttagccataaaaagcaggaaattctgtcatttgcaaaaacatggatgaacctggagaacatcatattaagtgaagtaagccaagcacagaaagacatatgatctcactcttcagccaaatctaaaaaagttgatatcatagaagtggagagtagaatcgtatttacagatctggggtaatgtgggtgagggaggaaggagggcagtgttgactggggaaatgttggtcaaaggatacaaaatttcaggaagataagagaaataagttcaggagatctattacacaacagggtatctccaattaataacaatattctgtagtcttgaaaaatgctaggagggtggatattaagtgttctcaccacaaaaatgataactatgtgaggtaatgcattgttaattagctagatttagtcattccacaatgtatacataccataaaacttcatgttgcacatgataaatacatacaattatatctgtcgatttaaaaagaaagaatttctgtcctagatcatttgagcccctcactcattttcttaatatacaaccagcagtcgcaatgaatcacatattcccaatgctcctgttctgtagagagtcaaggggaatgacttaaaatgactacacaaaaaacaacagttaaaacatattaaacattattatatgcctagcactgctctaaggggctttacgatattaattcattctaatgacagaaccaatattccaacccagatactctggatccactcccctattcttaaccacaacagtgtactgcctctcacagtacacacacacacacacacacacacactcacacacacacgcctaaaacacaactggagctgccaaacctcagagagatctggcaagtattacaaatatcatctcatggactccctggaaaaatcctggctcttgttgataccaatttctgtgcggtcacttttccactaccgaatgcctcacaggcaatggagatcatccaaccatctccattcttccctgttttgaaaaggaggtctgtaaagaccaactgatgtctagtgtgtgattccacctaaacactaatctcctccttcccaaatatgggtctaaaatggagctttaatattaactactggaggtgtatttctataccagcttcgaaaaagagagcgcacaggaaggtgtgaacgatttgccaaattgttttgtgactattaagtggaaaggtgaaggagggggcacgaatcaatttgcatatccccctagtttcactgaaaatttaaggggaaatctcaatattctaaaatcaaaaacgcatgtcttgaacaaatacaaagcacaaactcacccttgactttaggtgtgcagcagtaacgctctcatcctcctccaggtccttcttttggataaaaatacgactggagaaggatacggcaagcgtgagactccaggcatttcttggagcgcagactaagtttgaaaacaccctccctccatagccacaatttccctcacttcacacgaaataggaaggaagtaaaaggaagaggaatcgattcaaccagtacaaccagtttggagctggtttctggggacagagctctgaggacgctgtggttctcaacatgtagctgcccccctggggaacactcgggggcacttctgcgctttcttgtgtaaagcttcattctcggctcaatatctgacctccctactggggccattcctctgctgcagtccccgcagctgtgaagcggaaagagggaggaagcagcaggagcctaggggcaccggcacagtgtcactcagcaaagtgcgctgcgtccacacgccctcccgggcctgtgcatagaacctcacgcacacactcacagtcccctccgtcactcatgatctcacaatccccctcctctgatacccgcgcacacacacgcctggggatccggcagatcccgtctgcacccccgggttcctactctgagcgcctccccctaggccacccgcactgtcgggtcagtcaggctggagccccaatccgcagagatctcccgcagccacagatctcttcctcagacgtgaagaccttaccccgctatgtcgtcgaccccggagaccggaagtggactggcgcggtggccgctgggaaatacagtcccgaacagaaaaagcctcagaagccttgagctgtgatccgttcaggttgatcccagcatactatgggggctgacccctaagggagccgagcctagtggattcgtgggagttccagcccgcggggtgcacaggttgttgccatgagcaaggatccccatgtgagaagagcgtttccctctcggagcgtcagtataatttactttttctctccatggagaatgcaaatgagcagaacttttaaagaagaaagaagaatttaaagtaaaattatgtcaacatgtaggtgctttaactcctttgtctcagaccccagcgataggcttccacttctctgtgctatttgaaggggacttaggataaatttgaaaagcttgaactaaagaattggttggttatatactaggagaggaagtgtggttcacattggagatttcagaatcaaatgtcctggattcttcgagacaatgttcctgttatctggagagaaaaacgtgattcaggacgacatggaaacggataaaaatacacagataattacttgccttatcttgaaggatgaataattaacactttgttaaaatagtataaacaaatgcaaaaaagggcttgcttttcctaggaagagcctgatttcactgttgtagtctaacaatatttaactttcaaaatcatttttctagtttcctatgctacataaggaggaaacatgtaataataaagagcaaaacgtcttttcattccagaattgtgacagaaaacaaataagatgattaactcaaccatatcaataatcacattaaatgtaaatggtctaaacaccttaatttaaaaagattgtcagattggattttttaaaaagtcagacccaaatgtgcatcaatgatagactggattaagaaaatgtggcacatatacaccatggaatactatgcagccataaaaaggatgagttcatgtcgtttgtagggacatggatgaagctggaaaccatcattctgagcaaactatcgcaaggacagaaaaccaaacaccaaatgttctcagtcataggtgagaattgaacaatgagaacacttggacacagggtggagaacatcacacaccggggcctatagtggggtcgggggagggggaagggatagcattagaagatatacctaatgtaaatgacgagttaatgggtgcagcacaccaacatggcacatgtatacatatgtaacaaacctgcactttgtgcacatgtaccctagaacttaaagtataataaaaaaagataattaaataaataaataaacaaaaagtcagacccaaatgggtgctacctacaggtaatatgttaaatgaaaagcactaaaaggttaagagtaaaaggatggaaaaatatacaccatcctaacactagtcaaaagaaagctggagtggctttattaaaaacaaagtagactccggacatagactattaccagagataaagaagggcataataatgataaaggagatagctcatcgagtagaaaaaaacaaacataaattttgctcctaaaagcaaagcttctaagtatgggaagaaaaatctattagatcgaaaaggagacagatccacaattatagtcagatatttcaatatatctctcttggtaattgatagaacaaacacagaaaagcaacagggtatagcagatttgagctacatatcaacttacttgatctcatttatatttgagaacactctcctcaatgacagtaaaattcatctatgtggacaggggatacttaccagtataggccatattctgggccataaaacaagtctcaataaatgtaagaggattcgagtcatacaaagcatattctttgacaaaaatggaattaaattagaactcaataatagctgaatatataatatattgtccaaagtagtacaaattcgaaaaggtatgaatactaaggtaattgaaattatgtaatgtttgaaaaattcctgtattaattataatattctgttatatcctaaagggtgaaacaataacatatatacgttaaagcaaaataacaattttgtagtaaggaaaaaaatttttaagctatttatgttgactaaacattagaataaagcggagaataattatatttaagtatattctgatactttaatcgatttcctaaccaatatcaccattctttttaagtattttctttcaatgtggtctattatttttaaattttgataaaattttatgcaatcttcaatgttggactttatgtttaataaactcaaaattatagctaccttcaaatgactcttctctgaacaccatactttttaaactgagatatatactctgtatatactaaggtaaccagaagtctcagaatatatccaatgaaatggaagatatcctcacaagtattgtgaatattgaatatggaaaaattagattgcagttcatattcttgtagttaatgtatcttgccttcaaggtacatctctttttttgccatctcttttttgtaccctaagaagggtacatttctttgataattatctttacaaggcaaacatattggttctatttatgattcctttgaatgttaagccaaatttagatgctgcagtaacataaggcttctcaactgcgctccattctgacacaaattgcaaattgatccagttaaaaattggagcatcatcaaaagactattcccatagctgaagaaattcctcagtaaaattgaagaatttcaaaattaaatcctgtatgccatctgatatttcatgacttaattcattcagtttctttcttaatttgtaggactaaatcccattgtcttcatgttggccagttctgataactgaaattcagttgaatttctatgttgaataggagtggtaagagaagacatctttgtcttgtgccaaatcaacacaatcttaaacaaccaaaggattaaagaatgaatacaaaaatttagaaaatattttagataaatacaaataaaaacacatgttaccaaagtttatgatatgcttattactaagagaaaaatttatagctctacatgcctatataaaagaagaaagatgtcaaatcaacaacctaactgtacaactttaggaattagaacatgaaaaatagcaaaacaataaataaatagaagacaagaaaggaaggaaataataaaaataagagtggagttaaatagagaatagaaaaataatacagaaaaattacaaaattaaaagtggttctttgaaaagatcaaaagaagtagcaaaatcttagctggattgactgagaaaaaaatagaaaagactcaaattactaaagtcagaggtgaaagtggagacattactaaccttacagaaatgaaaatgattatagaagaatattataaacaattgtatgccaacaaaataaactaaatggaaaggaacaattctttttttgcaatatttatttattattatacttttaagttctgggatacatgtgcagaatgtgcaggtttgttacataggtatacacgtgccatggtggtttgctgcacctatcaacctgtcatctacattaggtatttctcctaatgctatccctcctctagtcccccacccccgacaggccccagtgtgtgatgaggaacaattctttacacaaactgtcactgattcaagaagaaatagaaaatcttaagaggagtgatgtcagcaagattggagaatgggactttccagcacttagccctcacatcaatttaaacatctgtttactcatgaacaaactttcacaagagctaaagtatccaagtaagagattagagcaccttgctgtagcacagaaacaggaaaagatacattaaagaggctaagaaggagcgttttgcattacctagtccatcactctcccaagcccagcccagaaattatagtgtggtgagataccctccgtgttagaggatgaataaagtgaacaccaactttgctgtggaccctggcagcaggactactccactgaaacccaatgaccagctggcccccttgacccaaactccaaggtggcaccctcagctccaggcacaaagctggcacccacagatccaagctccaggataacccccatggatacaggctgtcagcctacccagcccctgtggctccagtctctaagctggctcccatggtcctacactctgacaaacccagggttcaaacccactccaccgcatccaatatccagacctggcccaggagaccccaagtgccaggccagctcctagagaccaaagctttagaaccacacctaaaaacacaggctccaggctggcctccatatccctaggacagcacccacagcctcaagcttcagactgacccctgtggaatccagacccaaatatgccccagaccagacccaagctccaggctggttcttgtgaccctatgctccagtggacccagggtccacgcctgcccaagcggatcctggaagcagggtgacccctatgagctcaagaccaaggcatattatgggcctatgtccagaccaccccagcaccaggtcaacctctgtggacccagacttcaggctggttcccatggacagtcctcaggcctatccatttgttgaccctggcaccagaccagcatgtctgataacttcagcagtaatcccacccacaaacttctctatacagcccacccaatatctctgatgaagggctttcactaccaaagctagtctgtaaagactagaagggatgcctacttcttcaaatgttcaacaccaaagcaagttcacaaagatcatgaataattaagaaaacatgacaccaacacaaatcaaaataaaccatcagtaaccaactctaaagaaatgaacatttacaaaatgcctggcaaagaattcaaaatgactgttttaaagaaactcagtgagcaaacaagagaatacagataaacactaaacaaaatcaggaaaatgatataggaacaaaattagaagttcaaaaaagagatagaaaacatagcaaatttttgcaaacaaaaattctggaactaaagaacacaataacagactgaaaaattccatagaatgcctgaagagcagacttaagcagaataaagaattaatgagcttgaagacaggtcatttaaaagttaaaagacaggccaggtgcagtggctcacacctgcaattccaaaactttgagaggccaatgtgggagaattgcttgaggccaggagttgagaccagcatgggcaacatagtgagaccttaattctacaaaacaaacaaaattttttaatttaaaaaaatttagctgggcatggtggtgcagagctgtagtcctaactactcaggaggctgaggcatgaggataactcgagcccaggagtttgaggctgcagtgagctatgttcatgtcagtgtaccctagcctgggtgacagtgagactctgtcccaaacaaaacaaaacaagctaaaaggattaaaaatgactataactacaacaatttgcctatgggtacatgatatatacaagatacaaattatactttggaaggccgagttgggcagatcacttgaggtcaagagttcaagacaagcctggccaacatggtaaaatcccttctctactaaaaatacaaaaattaattgggtgtggtggcatttgcctgtagtcccagctactcaggaggctaaggcaggagaatcacttgaaccctggagacagaggttgcagtgagctgagatcatgccactacactccagtctgggtgatagggtgagactctgtctcaaaaaaaataaaaaaggtacaaattatgacatcaataatgtaaaatatgaggagagaagaaagtgtagaatttttttttttttttgagacagagtctcgctctgatgcccaggctgcagtgcagtggtgcaatctcggctcactgcaagctctgcctcctgggttcatgccattctcctgcctcggcctcccaagtagcttgggaccacaggtgcccaccatcacacccggacaattttttatatttttagtagagacggggtttcactgcattagccaggatggtctcgatctcctgacctcgtgatctgcccgcctcggcctcccaaagtgctgggattacaggcgtgagccactgcaactggccaaagagtgtagaatttttgtatgcagttgaagttaaattgttatcagcttaaaataggctactacaattataagatgttttaggtaatccttatagtaactacaaagaaaaatacctacagtaaatacaaaaaaagacaaagagaaaggaatcaaagcatatcactacaaaatatcatcaaataacaaaggaaaacagcaagggagaaaaatagaacaaaggaactacaaaatagaaaacaattaacaaatggcagtagtaatgaataattactttaaatgcaaatggattaaatttgccaatcaaaacacatacagtggttgaatggataaaaaaaaacaagatccaataatattctgcctacaacagactcagttgtaaggacacacataggctgaaattgaagaattggaaaagatatttcatacaaatggtaaccagaagacaccagtggttgatgggtgcagtggtatattcctgtagtcccagctactcaggagtctgatgtgggaggattgcttgagctcaggagttcaaggtcagcctgggtaacatagcaacacccatgtctattaaaattttttaattaaaattgaaaaaaacagagaacaagggcagctatgcctatatgagactaaataaactttaagtcaaaaaactgtcacaagacataaagaaacattattgtatagttataaaggggtcaattcaataagaagatataataattataaatatatatgtgcccaacaatggagcacccaaatatatgaagcaaatgttaagagaactgaaaagagaaagagataacaatacaataatagtagaggacttcaatactctactttcaaccattgatagataaaacagacagaaaatcaataagaaaataggggactttaacaacagtagacaccaaattaggcataataaacatatatggaacatttcacctaacagcagcagaatacacattcttctcaagtgcacatggaacattctttggaataggtcacacgttaggtcacaaaacaagtctaaacaaattcaagaagattgaaatcatgtcaagtatcttttccgacgacaatgaaataaaactagaaataacagaaagaaatttggaaaatgtacaaatatgtggaaactcatacactactgaacaaccagtgggtcaaagaagaaatcaaaagggaaatcagaatatatattgagatggccaggcacggtggctcatgcctgtaatcccagcagtttgggaggccaaggtggctagatcacgtgaggccaggagtttgaaactagcctggccaacatggtgaaacctcatctctactaaaaatacaaaaatttgccgggcgtggtgttgcatgcctttagtcccaactacttgggaggctgaggcacgagaatcacttgaacccaggaggaggatgctgcagtgagccaagatcatgccactgcaccactacactccagcctaggtgacagagcaagatgctgtctcaaaaacaaacaaacaaaatatatatatacgtatatatatagaaagagagagagaggggtgggggaagggagagagaaatacaaacggaaacacagcataccagaagttattggatgcagcaaaagtgcttacaagagggaagtttatactataaatgcttacattttaaaaaaagaaaaaaatgtcaccaataaataacctaacaatgtacctcaaggcctacggagagaaaaacaaacaaacaaacaaaaaaaactggacctaaaattagcataaagaaggaaacattaaagatcagagcagaaataagtgaactcatgaccaaaaaagggttaataaaattaagagttggcttttctgtaagtcaaaattgacaaatctttagctagactaaggaaaaaaaagagagaaaactcaaaaaataaaatcacaaataaaagagtagacattacaagaaatgccacaaacaaaaggattagaagagacaactatgaacaattatatgcaaacaaactggctaacagaaaaaatagataaatttctagaaacatataatctgccacgaccgaataatgaagaaatagagcctgaatagactaataacaagtatggagatcaaatcaggaatcaaaaccctacaaagggaatcccaggaccagatggcctcacagctgaattccatgaaacatttaaaaaagaattaacatgaattattctcaaactcttccaaaaaattaaagataaaggaatgcttcaaaactcaccttataagtttagcactgccctaatacctgatactcccatcacaagcagctagtaaaagaacaaatcaagccaaagaatgtataaaaggaagtaccacatataaaagcagaagtcagtaaaatataaaacaaatatacaatagataatgcaatatcggaatttggttcttttaaaatatatatataatttaaaaacctctagcaaaatgtatgagagagagaggagtgtaagagggagagaggaaaaggaaggcaggaagaaagggagggagagagggagggatagaaggaattactaatatcagaaatgataaatgaggtctgaatacagactctgtagacattataagccctcagaaataatgccgcatatctacaaccatctgatctttgacaaacctgacaaaaacaagcaatggggaaaggattccctatttaataaatggtgctgggaaaactggctagccatatgtagaaagctgaaactggatcccttccttacaccttatacaaaaattaattcaagatggattaaagacttaaatgttagacctaaaaccataaaaaccctagaagaaaacctaggcaatactattcaggacataagcatgggcaaggacttcatgtctaaaacaccaaaagcaatggcaacaaaagccaaaattgacaaatgggatctaattaaactaaagagcttctgcacagcaaaagaaactaccatcagagtgaacaggcagcctacaaaatgggagaaaattttcgcaacctactcatctgacaaagggctaatatccagaatctacaatgaactcaaacaaatttacaagaaaaaaacaaacaaccccatcaaaaagtgggcaaaggatatgaacagacacttctcaaaagaagacatttatgcagccaaaaaacacatgaaaaaatgctcatcatcattggccatcagagaaatgcaaatcaaaaccacagtgagataccatcccacaccagttagaatggcgatcattaaaaagtcaggaaacaacaggtgctggagaggatgtggagaaataggaacacttttacactgttggtgggactgtaaactagttcaaccattgtggaagtcagtgtggcgattcctcagggatctagaactagaaataccatttgatccagccatcccattactgggtatatacccaaaggattatacatcatgctgctataaagacacatgcacatgtatgtttattgcggcactattcacaatagcaaggacttggaaccaacccaaatgtccaacaacgatagactggattaagaaaatgtggcacatatacaccatggaatactatgcagccataaaaaatgatgagttcatgtcctttgtagggacatggatgaaactggaaaccatcattctcagcaaactatcacaaggacaaaaaaccaaacaccgcatgttctgactcataggtgggaattgaataatgagaacacatggacacaggaaggggaacatcacacattggggactgttgtggggtggggggaggggggagggatagcattaggagatatacctaatgctaaatgacgagttaatgggtgcagcacaccaacatggcacacgtatacatacgtaacaaacctgcacattgtgcgcatgtaccctaaaacttaaagtataataataataaaattttaaaaaaagagaattaaggtaaaacaataaaaactttttgacatttgacaatttagttaaatgtccaattttcttgaggaataaaacttgtacaaattgacataagaagaaatagaaattctgaattatccttaatctatttaaaaaaaaggactagtatttttttaattctcccaaaagaaaattccaagtctaaatcgcttcactaatgaatccttctaaacatttaagaaatatcatcagccttagacaaactcatccagagaatagaaaaaaatggaaacatttcccaactcattctaaaagtccagtcattctgatattaaaacctgacaaggatacttcaatttgtatcttataaacataagtacaaaaatctttaccaaaataatagcaaatcaagaaaaatataagaagtataatatatcacaaccaagtagggtttatttaagaaatgcaagggtagcgtaacattgaaaatcaatcagtataattctagtatattaacagaaaatacaatcgtcttggtagactcagaaaaaccacttgatagaagtcagtacttaaaacacagcaaactaagaacaaaaaaagcttccctatttttataaatatcatctaatatgatttgctaaagaactttaaaaagcactttagcaaatcataagatttttaaaaatgatttaaaagttcattttaatcataagatttacaaagaactttagcaaatcataattaatgatgaattattataattaatagtgaaaaattgaaagctcttcttctgagatcagaattaagcaaggatacccattctcaccactttatttgaggctccattcaatgcattaaagcaaaacatatgaataaaaggcgtatcaatggaatgaaaatagacaacctgttgttcctcacagatgacatcatggcaaaaatagaaaataaaaatgaatctacagcaatgtattatataatttagcaatgtcactggatttaaatataaagtacaaatacaaaaaagaaatattatttctatgtaatttctaaatactaccaacaaagaaatataaaatgaaaattttaaagtggtgccatttaaaatatcaagtatctagaaaaaaatctaataaatggtgtagaaaacttctacactagcctagcccagtggctcatgcctgtaaccctagaactttgagaggctgaggagggaggcttgcttgagggcaggaattcaagaccagcttgggtaacatagtgagacccatgtctctacaaaaaatatttagctgggcatgatggtgtgcccctgtagtcccagctactcaggaggctaaattgggaggatcacttgggcccaggaggtcaggctgcagtgaaccatcatcacgcctctgtactccagcctaggtgacagagtgtgaccctgtctcaaaaaaaagactttgggagcctgaggtgggaggatcacttgagcccagattctagaccagcctcagcaacatggtcaaaccccaaaaatgttataaaaattagccaggcatgatggcacacacctgtagcctgggagatcgagattgcagtgagccgtgccactgcactctagcctgggcagcacagcaagaccttgtctcaaaacaaaaacaaaacacaaattgttcctggaaaaaaattaaataagacctaaatcagcaagggatacactgtttatagattgaaatactcaatttggctggatgctgtggctcacacctgtaatcccagcgctttgggaggctaaggtgggcggatcacctgaggtcaagagttcaagaccaacctggccaacatgatgaaaccatgtctctactaaaaatacaaaagttagatgggcatggtggcagccacttgtaatcccagctactcaggaggctgaggaatcgcttgaacccaagaggtggaggttgcagtgagctgagattgtgccactgcactccagcctgggcaaataaaaaaaaaaaaaagattgaaatactcaatttttaaaaaatatcaatccttccaaatagatatatacattaaatgcaaccccagtgaaaattccagcaggattgtttgtgaaaatgtataggctgattccaaaatggaaatggaaagatcagagatgaagaaaagttcattgaagagaaactgaagaaaagaacagagctggagggcttatttaaaagcctttataattaagataatgtagcaatggcacagagttagacaaatagaccaatgggaaagagtagagattacaaaactgaagtaaagacaaaactgtattctcaaaaaagttgtgcctaagtgtcccaaagacatacacaaaaacagtgctgttatgacagtggaaaaatacagtgatatgaaaataaaaactggctgggcatggtggctcatgcatgtaatcccagcactttggaagactgaggcgggcagatcatctaaggttaggaattcgagatcagcctggccaacatagcgaaaccccatctctactaaaagtaccaaaattagctgggcgtgatggcgaatgcctgtagtcccagttactcgggagtctgagacaggagaatcacttgaacctgggaggcagaggttgaagtgagccgagattgcactactgcactccaggctgggcaaaagagcaaagctctgtctcaaaataaataaataaataaataaataaataaataaataaataaataaaaagaaagaaactaaaaatttcaactacatgcaatagtatgtatgagtttcaggacataatgttgagccatagaagtcaggcacaatgagtatatgtactgtgtgattccatttatacaaagctcaaacacaatgaaactaatctacagttttagagatttggatagtggtaacctttgggattagtgactttattatggcatgaaagtagaccctgggatgttggtattactctgtttcttaatctggattttgttttcaggagagtattcaaattatgaaaatgtgaaggtctgtacacttacgatttgaactctctcctttgtgaatgttgcactgaaataaaatgtatgggaaaaaagacataaggttaggtaaataatagcctggaactttcataaatctttttttttttttatcttttgaaaaaagatgttacactgtcactcaggctggagtgcagtggcactatcatggctcactgcagcctcaacctcatgggcaataacaagtgtgatgtcagtctgaggtcggacaggcagttgttgggcagatgtccttgcagaagtattcttttgtgtaagattacaacggcctttgtgcaaggttttggttttgttttgttttgtttagacacaactcaagtgatcctcatgcctcacctcccaaatacctgggactgtagatgcacgacatcttgcccagctcgattgtgagttttgcaaagtcttttctgttatcaggcatacaagctgagaatcccctcttcatagccctcttcatccaactctatttgtcaggatttgtttaacattagtgattccattttgattctggaaactttcacatttccctctttcattcaagatctttctccaaaaacatcactgatcaatcatcctgtagttaaatttttatgtcccttaatgctgacatgaacctgttgcagttgctggtcttgacccacattgagggaagtgattggtgactaggaatcagtgtgaaaaccctttgagccacatttaaacaacaagggagatttcaaaggagtggctgttatgccaagtctacgtggaatccattactaaattctattttgtctgttctgtagttttttggtaatcatctgaaagtgcttggctagcattattttattaggagttgtattctgcaaaattaacaagtaacaaatacaaagtttttaaaagggacaaaaacaaagtaaaactaactgcagtatgacaatcccagtttgcataatggtcttgagacatgaacctaggcttaaagacaactaattgaatatatcaagtgaccatagaaaattagatgagacctattgtaaccatgtggcctgttttcttattttgtgtatatgcgtctcaactttcccagaggaatctatccaggtacagcatgtaatagtattagcaatagtacagaccttttcttatttaaccaatagatgctaaaggatttcttaggttaagatttctgccaggcgcggtggctcacgcctgtaatcccagcactttgggaggccgaggcgggcggatcacgaggtcaggagatcgagaccacggggaaaccccgtctctactaaaaatacaaaaaattagccgggcgcagtggtgggcacctgtagtcccagctactcgggaggctgaggcaggagaatggcgtgaacccggaaggcggagcttgcagtgagcggagatcgcgccacagcactcccgcctgggcgacagaacgagactccgtctcaaaaaaaaaaaaaaaaaaaaaagatttcttaagttaccagcagaagctgttgaacgtaaaatttcatttacaccataacatggtttggctctgtgtccccacccaaatctcatgtcaaattgtaattcccagtgttggaggaagggcctggtgggaggtggcggacttccccctgtcccccttgctgttctcgtgaaaaatgtgtagcacctccccacctacgccctctctctctctctctccagccatgtgaagatgtgcctgcttccccttcaccttccaccatgattgtaagtttccggaggcctccccagaaacagaagcctgtacagcccacagaaccatgagctgattaaacctcttctttataaattacccagtctcaggtatgtctttatagcagtgtgagtgtggactaattacaccattatcctgataagtgaaaacggtaacattaaggggagccttggggaaagctgtttacaacataacaacatcaacttctcctcctgactggtagtttgaatgtctgggcatgacattgggtggtttggtgaactttttgtatggtccatacatcaggcatgaggcttgttcctgaaaattcatctagtttcagcttatagggctttaggaatagagcagattttgttttcagttggagagttgtagccaaatattgaaaaaaattaggagaattcatgaatgggtctagtctataggtagatgacaaaaacttgaaactaatgcacagggctacagtctaatctaataatgggtgtattatagtttttctttgaaacaaagtttttccctctacattgataatataaaaatctcagatttggcagggcatggtggctgatgcctgtaatctcagcactttgggagaccaaggtgagtggatcactggaggtcaggaattccagaccagcctggccaacatggtgaaaccctgtctctactaaaatacaaaaaattagctgggcatggtggcacacacctgtaatctcagctacttgggaggctgaggcaggagaatcacttgaacccaggaagtggaagcagaaaaaacatctcagatttaaaaaccttttgagattaggaagccaaacctaggcagatgttagattttactaagaatcttaaggttgttgggcctgccaggaagtgaccatttttaatcactcattgtaagactgggaactcctgaagctaggcatctagtgtacattcttaaatgtggcatttcagtcaaaaaccttggtaatagagccaatgtttcaaattgcaatctggttataaagaaagcaggtctttattaaacttatgtaaatgaaaacaagaatactcacaagtggtttctgaattttggagaaatcaagtagagagaaaaagcaaatgcttccatgtttgttgacaaaagtacaatatacttatttacaaattgttgtaaactataccttatgaaataaaatgtccttaaatctgggaaacaaaacatttaagtaaaggatgttttaaataaaagttataaaacattatctttatcagttacttaattttatgtaattaattttttgttgttcttgatcccaattaatagtttttttttttttttttttttttttttttaatttatttttttattgataattcttgggtgtttctcacagagggggatttggcagggtcatgggacaatagtggagggaaggtcagcagataaacaagtgaacaaaggtctctggttttcctaggcagaggaccctgcggccttccgcagtgtttgtgtccctgattacttgagattagggattggtgatgactcttaacgagcatgctgccttcaagcatctgtttaacaaagcacatcttgcaccgcccttaatccatttaaccctgagtggacacagcacatgtttcagagagcacagggttgggggtaaggtcacagatcaacaggatcccaagacagaggaatttttcttagtgcagaacaaaatgaaaagtctcccatgtctacttctttctacacagacacggcaaccatccgatttctcaatcttttccccgcctttcccgcctttctattccacaaggccgccattgtcatcctggcccgttctcaatgagctgttgggcacacctcccagacggggtggtggctgggcagaggcgcccctcacctcccggacggggcggctggccgggcggggggggctgaccccccccacctccctcctggacggggcggctggccgggcggggggctgacacccccacctccctcccggacggggcggctggccgggcagaggggctcctcacttcccagtaggggtggccgggcagaggcgcccctcacctcccggacggggccactggccgggcaggggggctgaccccccccacctccctcccggacggggcggctggccgggcggggggctgacccccccacctccctcccggacgaggcggctggctgggcgtggggctgacacccccacctccctcccagacagggcggctggccgggcggggggctgacccccccacctccctcccggatggggcggctggtcgggcggggggccgacccccccacctccctcccggacggggcggctggccgggcagaggagctcctcacttcccagtaggggcggccgggcagaggcgcccctcacctcccagacggggcggctggccgggcggagggctgacccccccacctccctcccggacagggcggctggccgggcggggggctgacccccccacctccctcccggacggggcggctggccgggcagaggggctcctcacttcccagtaggggcggccgggcagaggcgcccctcacctcccagacggggcggctggccgggcggagggctgacccccccacctccctcccggacggggcggctggccaggcggggggctgacccccccacctccctcccggacggggcggctggccgggtgggggggctgacccccccatctccctcccggacggggtggctggccgggctgaggggctcctcacttcccagtaggggcggccgggcagaggcgcccctcacctcccggacggggcggctggccgggcggggggctgacccccccacctccctcccggatggcacagctggccgggcgggggggctgaccccccacctccctcccggatggggtggctggccgggtggggggctgacccccccccacctccctcccggacggggtggctgctgggcggagatgctcctcacttcccagatggggtggctgccgggcggagaggctcctcacttctcagacggggcagctgccgggcggaggggctcctcacttctcagacggggtggttgccaggcagagggtctcctcacttctcagacggggcggccgggcagagacgctcctcacctcccagacggggtctcggccgggcagaggcgctcctcacatcccagatggggcggcggggcagaggcgctccccacatctcagactatgggcggccgggcagagacgctcctcacttcctagatgtgatggcggctgggaagaggtgctcctcacttcctagatgggatggcggccgggcggagacgctcctcactttccagactgggcagccaggcagaggggctcctcacatcccagacgatgggcggccaggcagagacactcctcacttcccagacggggtggcggccgggcagaggctgcaatctcggcactttgggaggccaaggcaggcggctgggaggtgtaggttgtagtgagccgagatcacgccactgcactccagcatgggcaccattgagcactgagtgaacgagactccgtctgcaatcccggcacctcgggaggccgaggttggcggatcactcgcggttaggggctggagaccggcccggccaacacagcgaaaccctgtctccaccaaaaccagtcaggcgtggcggcgcgtgcctgcaatcgcaggcactcggcagactgaggcaggagaatcaggcagggaggatgcagtgagccgagatggcagcagtacagtccagcttcggctccgcatgagagggagaccgtggggagagggagagcgagagggagacggagagcgagagggagacggagagcgagagggagacggagagggagagggagagggagagggagagggagagggagagggagagggagagggagagggagacagagggagagggagagggagagggagagggaccaattaatagttttatgagtccatcagtttctttattagagttcttgaaatttttatttaatccattgatcttaaagctgtcagaaatctgtgttcaagcctggtgcagtggctcacacctgtaatcccagtactttgggaagccacagcaggagaataacttgaggccaggagttcaagtctagcctagacaacatagtgagacccccctctctacaaaaaaataaaaataataaaaccagccaaccacagctgtggacacctatagtcccagccactcgggagtctgagatgggtagattacttgatcacaggagttcatagctgtagtaagctattatcatggcactgcactcaaattgggtgacagagtgagaccctgtcaccaaaaaaaaaaaaagtctgttcaagggtacgtgttagagttgctttcttgaaaagcaattttgaaccatggctgattataaatgtttttagagaagaattcaaaacaattactgtaagtaacaaaaacttagactagccataaaggctcccaatttatcaaaacagaatcacacatcactgtaaaatcatggttattcatttaaccagagtgataatcaaaaggcttcaaaaacaatacagaaaatttcatggatatgaaaactttaaccctttcaaagctcagtttttctaagtaatcaaaaacctaataaagacaacgtaggaattgtcttgataaaatgtaaaatctttggggttttgtttaagaccagttacaaaaagctaaattaaaaacttcttgtattctaattgtttttccttatgggaagcatgtttaggcaagctggaagtcaaatctaatgaaaagggtacttgaattttatcagacacaggaagagtttgtccaaggctatgagtaaacactatattatagaggaatgtaaataagaaaactagtaccttgagcaggggggaaaacatagctcttagtaacagcatgggaagtttcccggttacacgaagcaattcagacacatcaagaaaagccaagagtacagaatcaagttatactggaagaaaacattgcttttcttgacctgcaagataaacatttcagcattgggccataacagtaggattaaaaccgggggtggggggtgagggaagttacagcaatttaaaaaaaaaggttgaatgagaaagttatcacctcagccaagcaaaaatgatataccatttcaaggggagaaagaacagaaggcaatgatgtatgaccatcacatcacatgcagtgagatacagcgaaggatgaacttctcataaataaatctgagaagttccaaaaagaaaacaatttaccttgagaataaaatcacattctgaatgaaaaagatagcatttcgaacctgaaattagggaggttaattatatctcaggaagaaatagaaataatatagaaagatggttgttaaacagatttcagaattaaaaaccagaacctcttgtaattttatatagagcaaatcaatactttaagaaaaacttattctaacatagaggactaaatttttttagttttgcattagtgcttttttttctttttttctttcttttttttttgttttttttttttgtttagacagagtcttgctctgtcatccaagctagagtgcagtggtgccatctcagctcactgcaacctccacctcctgggttcaagcaattttcccgcctcagcctcttgagtagctgggactacaggcacccactaccatgcccagctaatttttgtatttttactagagggagggtttcgcaatgttggctaggctggtctcgaactcctgacctcaagtgatcctcccaaagtgctgggattacaggcatgagccaccatgcccagccagcatttttaatatctgtattagtccatttccacactgctataaagaactacttgagactgggtaatttatttttttttaaaaaaaaggttcaattgacttacagttctgcatagccagggaggtgtcaggaaacttacaatcatggcagaaggtgaaggggaagcaaggcacgtcttgcatggctgcaggagagagagataaagaaagtgccacacttttaaaccatcagattgtgtgagaactcactcactatcatgagaacagcgtggggtaaacccacccccatgaaccaggtccctccacaacacatggggataacaattcaagatgagatttgggtggggacacagaaccaaactgtatcaatatcaaacttcagtctttagaaagactaaattacagccaagttgatcccacacaaaattctttttttttttctattgagacacagtctcactctgttgcccaggctggagtgcagtggtgtgctcttggctcactgaaacctctgtctcctgggttccagcgattctcctcaatcaggcccctgagtagctggaattacaggcattcaccaccacaatcagctaatttttgtatttttttagtagagacagggtttcgtcatgttggccaggctgatctcgaactcctgacctcaggtgatccacctgccttggcctcccaaagtgctgggattataggtgtgagccaccatgcccagccaaataaattttcttttcatgaactttatcacaatttatttagactattgacaacatgcttggactttctactttgtcctatacttcctttttcttaaataaccagtcattttactttaggacaaaaatttaccatgaaaagattctttctcatacaaaattattcttctattttttaacctcccttacgaaaaatacatcttcatattcctaccttttctcacattcctctctcctacttattggttcctttctatcttgtttgatctgagagcctaagctttaaaaacatttatctattcctttttcttttagattactaatttttcaaataagtgttttatcatcatacacaattgttagtcagacaactccaaatttatttatttatttatttttgatacagagtctcactctgtcacccaggcttgagtgcagtgatgcaatctctgctcactgcaatctctgccttccgagttcaagtgaatctcatgcctcagcttcccaagtacctgggattacaggcatgggccaccacactggctaatttttgtatttttggtagagacaggttttgccatgttggccaggctggtctcaaactcctggcctcaagcaatctgcccaccttggcctcccaaagtgctaagattacaggcatgagccatcacacccagcctaaatttgtatttctaaaaggtgtctcggttgttggttaccacggagttgtaattttaaagctattaattcaaaagccctttaaaacttcttcttttaaaaatcttgattggaatgccataagcagtgagttttatctcaacaccagcagaaaggtcagcagattccaagtaggcagagaaaaaattagagagatagcttagaagactctacatgttaactctatagttgcagatttttttttaacaatgaccatctaagctctgaattttccttgctgtaatttgcccatcaatgtaaaaatgtgcacaagaacaggccataatatgtgccaactatagtgggtcccagaaaatctggcatgccttattcatgtttgagaatgccattttgtttctttctttctttttttttttatactttaagttttagggtacatgtacacattgtgcaggttagttacatatgtatacatgtgccatgctggtgcgctgcacccactaactcatcatctagcattaggtatatctcccaatgctatccctcccccctccccccaccccaccacagtccccagagtgtgatattccccatcctgtgtccatgtgccatctcattgttcaattcccacctatgagtgagaatatgcggtgtttggttttttgttcttccgataggttactgagaatgatgatttccaatttcatccatgtccctacaaaggacatgaactcatcattttttatggctgcatagtattccatggtgtatatgtgccacattttcttaatccagtctatcattgttggacatttgggttggttccaagtctttgctattgtgaataatgccacaataaacatacgtgtgcatgtgtctttatagcagcatgatttatagtcatttgggtatatacccagtaatgggatggctgggtcaaatggtatttctagttctagatccctgaggaatcgccacactgacttccacgatggttgaactagtttacagtcccaccaacagtgtaaaagtgttcctatttctccacatcctctccagcacctgttgtttccggactttttaatgatcgccattctaactggtgtgagatggtatctcattgtggttttgatttgcatttctctgatggccaatgatgatgagcattttttcatgtgttttttggctgtacaaatgtcttcttttgagaagtgtctgttcatgtccttcgcccattttttgatggggttgtttgtttttttcttgtaaatttgtttgagttcattgtagattctggatattagccctttgtcagatgagtaggttgcgaaaattttctcccattttgtaggctgcctgttcactctgatggtagtttcttttgctgtgcagaagctctttagtttaattagatcccatttgtcaattttggcttttgttgccattgcttttggtgttttggacatgaagtccttgcccatgcctcggtgctctacacgttcagagaaacttctctagtaacaaactatagaaatgatccctgaaagtatagtcttgagaatgccattttgtttcttattcatctcctgggagcaaagaaaatcttctaagtcctgtaagggaattcagaagttttttaaaaattattatttttttattttattatttttttgatatgtagtcttgctctgttgcccaggctggagtgcaacagcgccatgttggctcactgcaacctccacctcctggattcaagtgattctccagcctcagcctcccgagtggttgggattacaggcttgcgccaccatgcccagctaatttttgtgtttttagtagagacggggtttcaccatgttgcccaggctagtccgaactcctgacctcaggtgatccacccacctcggcttcctagtgctggaatgataggcctgagccaccgcacccggacaaattcaggagtttagaccagtgttttagatggtggtgtctgccctggtagctgtaaagtagccctcgtgcatccatcatttagaatatttacttttgctcctgtaagattttcagaaacaagcaaggaaaaagagtcaaaccaaatagaaggaaaccaagataagaatgttccaaatattttaacccaggtgtgcagatcaaacaaaatattaaaccagagaaggtgcacagaccagagaagatgtacctcgcagacaggatgtaaatactttagaaacctagagtattcaatgcagaaagatacttgtctctatacccggaaggacttaccagaaaagacaaaaagtcttatttcaggagggatgtatggtctttcataaaaatgaccttatccaaacaagaccccaaataaagtcaaaaagcctccaacagaaggagggaggatcacttgtaatttgcccatcaccagggcagaaaaggtgagccagggaagtgactcagtaaatactgctcactggttccaagtatcaccatttccttctttttgttttggttgtttttgttgttgttgtttctttttattgagactgagtctcattctgtcacccaggctggagtgcagctacgtgatctcgcctcactgcaatgtccgcctcccgggttcaagcgattctccggcctccacctctcgagtagctgggattacaggtgctcgccaccacacccggctaatttttgtatttttagtatagacggggtttcaccatgttggccaggctggtctggacctcccaacctcaggtgatctgcccgcctcagcctcccagagtgctgggattacaggtgtgagacactatgcctggtcaccatttcttctgctagtgaactttttcaggtcctgtttcaaacaccatatatgtcaacctatttaacaaacagaaagagtctctctgaaagaaaagatatttgtttagcaatagagcattgcaatgggaatctgtataccatagtgaaatatgtgcaaattcagggagataaaggaagacaagggtttttaaatgaaaaaatgaggaggattacataattgttttgaaataattatccttggctacaaagatcaataacaagtctgagactggacagggaattgttgagcagatgtccttgcagaagtattatttgtataaggttatggtggactttgtgcaaagttgtggtttttgtagtcttttgtgacagtttttgtgatcaggcatacaagcatgaaaaccttctcttcatgttctccccatgcttgatttgtcagagttttcatttttcttcttttgggacaggatctcactctgccacccaggttggagtacagtggtgtgatcatggctcactgcggcctcaaactcctgggctcaagcaatcctcctgcctcagcttcccaagtagctgaaactgcaggcacctgccaccacacccagctattttttttatgttttgtagagatgggggggtctcactatgttgcccaggctgatcttgaactcctggtctcaagcaatcctcccacctcggcctcccaaagtgctggaattacaagtgtgagccactattcctggcccatgatatgtcagttttcttaacattagtgactccgtttcgattctgacaactttcacagttctcttactaatatatgttgttgacagccttctcaaagcaaaccttccatctgagctttacccatacatatgtgtatatgatacatgactagccacatgtatgatgcaggtgccttaaagacagagcaaactacatgtgctaaatagagtgtgctcttacctttacacccaaaccacagcctcttcagtttgtcagtgtcaataaacaccaccatgaccaatccagttgctcatgtgagagacttgtgagtcattacccatactaacctttctcaaacaaccctttatgagggcaaagtggctgatgcctgtaatcccaacactttgggaggctgaggcaggaggactgtttgaggccaagagttggagaccagcctgggcaacatagctagaccccatctctaaaaaaaaaaacagccctctccctctgtctccctctccccacggtctccctctcatgcggagccgaagctggactgtactgctgccatctcggctcactgcaacctccctgcctgattctcctgcctcagcctgcccagtgcctgccattgcaggcacgcgccgccacgcctgactggttttggtggagacggggtttcgctgtgttggccgggcaggtctccagcccctaaccgcgagtgatcccgccaacctcagcctcccgaggtgccgggattgcagacggagtctcgttcactcagtgctcaatggtgcccaggctggagtgcagtggcgtgatctcggctcactacaacctacacctcccagccgcctgccttggcctcccaaagtgccgagattgcagcctctgcccggccgccaccccgtctgggaagtgaggagcgtctctgcctggccgcccatcgtctgggatgtgaggagcccctctgcctggctgcccagtctggaaagtgaggagcgtctccgcccggccgccatcccatctaggaagtgaggagcgcctcttcccagccgccatcacatctaggaagtgaggagcgtctctgcctggccgcccatcgtctgagatgtggggagcgcctctgccccgccgccccatctgggatgtgaggagtgcctttgcccggccgagaccccgtctgggaggtgaggagcgtctctgcccggccgccccgtctgagaagtgaggagaccctctgcctggcaaccaccccgtctgagaagtgaggagcccctccgcccggcagccgccccgtctgagaagtgaggagcctctccgcccggcagccaccccatctgggaagtgaggagcatctccgcccggcagccaccccgtccgggagggaggtggggggggtcaaccccccgcccggccagccgccccatctgggagggaggtggggggtcagcccccccgaccggccagccgtgccatccgggagggaggtgggggggtcagccccccacctggccagccgtgccgtccgggagggaggtgggggggtcagccccccgcccggccagccgccccgtccgggaggtgaggggtgcctctgcccggccacccctactgggaagtgaggagcccctcagcccggccagccaccccgtccgggagggagatgggggggtcagcccccccacccggccagccgccccgtccgggagggaggtgggggggtaagccccccgcctggccagccgccccgtccgggagggaggtgggggggtcagccctccgcccggccagccgccccgtccgggaggtgaggggcgcctctgcccagccgcccctactgggaagtgaggagcccctctgcccggccagccgccccgtccgggagggaggtgggggtgtcagccccccgcccggccagccgccccgtccgggagggaggtggggggggtcagcccccccgcccggccagccgccccgtccgggaggtgaggggcgcctctgcccggccgcccctactgggaagtgaggagcccctctgcccggccagccgccccgtctgggagggaggtgggggtgtcggccccccgcccggccagccgccccctccgggagggaggtggggggggtcagcccccccgcccggccagccgccccgtccgggaggtgtgcccaacagctcattgagaacgggccaggatgacaatggcggctttgtggaatagaaaggcaggaaaggtggggaaaagattgagaaatcggatggttgccgtgtctgtgtagaaagaagtagacatgggagacttttcattttgttctgcactaagaaaaattcctctgccttgggatcctgttgatctgtgaccttacccccaaccctgtgctctctgaaacatgtgctgtgtccactcagggttaaatggattaagggcggtgcaagatgtgctttgttaaacagatgcttgaaggcagcgtgctcgttaagagtcatcaccaatccctaatctcaagtaatcagggacacaaacactgcggaaggccgcagggtcctctgcctaggaaaaccagagacctttgttcacttgtttatctgctgaccttccctccactattgtcccatgaccctgccaaatccccctctgtgagaaacacccaagaattatcaataaaaaaataaatttaaaaaaaaaaaaaaaaaacaaaaaaaaaacataaaaattagccaggtgtggtggtacaccactgtaatcccagctacgcaggaggccaagtgggaggatcacttgagcccaggagttcaaggccacagtgagccatgatcacacaactacattccagcctgtgtgacagcatgagaccctatctctaaaaattttttttaaagtacaaaagaaaaaaagacctttacgaaacacttgctatgtttactgcatacttctttcccaaggaattattgtgcaagtacaacgctctccttcatgctgattttcatcatctgtatcagagccatcatcccgtctcacctagtttacttcaaacatcttcaaaagatcaaaacatcaacagttgttttgaagatgtttgaagtaaactaggcgagaggggatgatggctctgacacagatgttttttcccatgtttacgcttactcaattcaataaactatgctcataattgttaggtaaactagacaattttttaaatgtctcctgtctctttgataaagtccttaaattacccaaaattactgttgggtacaaattcctaacctaatcgataaaacatggcagatggtcacggcatcctaactcagtaacctcagctcctgctcaattctcttgttgttggaacacaaggcatagcacacagaatttcctttcattctttgcatgtcctttgttcctttctgcaaatgttgttcaaacaatggtttccatttgcctaaagtgcctgctatggctggttaacctctaaaatatttagggagcagcccaacctgcagatacaaagatgtcaaaaaacgaaattacaacacatttactttaaagaccttaatttattttatttgtgattctagaatcaagcagcactttattctacaaaatagaatgagtagaggagctgagcagagcagggtggttttacagacagaaaagggctgaggaaaacagacacagagagcagaaagtgccttggccatttcaaagttacttcccctgtaaaggttaaagcagagggggtttcaatatcatgccagctaaaactggtcaggccgggtgcagtggctcatgcctgtaatcccagcactttgggaggctgaggtgggcagatcacctgaggacaagagtttgagaccagcctggccaatatggtgaaatcccgtctctaccaaaaatacaaaaattagtcgtgggtggtggcgcatgtctgtaatcccagctattcgggaggctgaagcatgagaatcgcttgaacctgggatagagaggttgcagtgagccaagatcacaccattgccctccagcctgggcaacagagtgagactctgacttaaaaataaaataaaatgaaatgaaatgaaataatgaaatgaaatgaaatgaaatgaaatgaaatgaaatgaaataaactggcctgcttggagatttggctatcatctccctctctctctctctctctctctctctctctctctctctctctctctcgaattattggaagatcagataaataacctagtttcagcttggtggcatggaacttcagcaggagtaactccatttttgtttggtctgttgagcctcatgcaggggctcagcccaaaccaatggctaaaccattggctaaactgtaaagtttatttaacaaaggggagctttccatggtcctgaaacaaactaccctgagctcctcattgcagcaacctatgcaactacaactatcattggttctgtaattgtttctttgatgtctggattcccccacagactttaaggaagtagatacctttctgtttactactgaataggagtgacacagggaaggtacttcttcacagtatgagatgagtggatgaatgactagagtataaaacgctgtcagcaactgggtaggctctacaacttcctcagcaggaggaccagaggctggaaacatgggtgtcactttttaagagcaaaagggggctgatggttggaaaaccagatactagaagaatgctggttttcataagccacacctgtggattgtcaaaaagaaaaagcacacatttcaaaagcagaagagaaagaaaaaaataaggcaaaagtgctcacaagtatcagaatagattttgtggctctggtctctggggatatttgcgagcactgtttagtgccatgaatgtatcagacttgccacttgtaccggtgagggaaaaaatatcttggagccactggccccatgccatgattcccaagcaaaaaacatcaatacaggagaaaataactgaacacattgattttgtaattgtatcaactaatagatgagaacaatatccaaggtttgatttcacagtgatatttctgctactccattggctagtcattctcatgggaacaatgagatttaccagcaagtgaaacacccagctcacaatacagggagaattaatatgtttggggggtttgaatttgagttctgcccacctggagtttgtggggttgatacttaaggcctggaagccacctaaaagacagatggtgttgagagaatttccccaggccactctgtgacaataaaagacaagtttacatccaacatcatccaggaagtattgcaacccaaaagctgccatcttctgagggattcctccacaaagaaggattgatgtattggctaacacaagatggttggttatttgctctaacggtctcaatctgtgtctcctaaaaagagaacagatataataacaaaggagtaacgaaaattccccacaatccctattccagtctgtgtaaagataatcacacccattgctacatcaatagatagcattccctcagtgactgagagatgatgcttttgctcagatccaggaacctggagaaaaatggaaggaacacatgaatttcttcaagtgaaatgaaatgtacttaatttctttcaaatctccttcctgggacccctatgctattgtcacacataaaaatcccatccatgaaggttttttctcctcaccacctagtatatctttcttggtacctataacaacagaaattatcttactggattatcttatttctattgaaggaagaccatttcctccaatggaaagatgaaggtcatgaaggcagacatcttgtctaccctgttttcagcccataactaaggtttagaacaacatactgttaagcagtcagtcaatatttatcacatgaataaatgaatgaactactgaacagagtcattatttccgtgtcaaaaattatttcaatgtgttctttaccttaatagatttattaacatgggaagcagaatctctccttgatagttaaaaatatctagtgcattaagctaattgcgttattcgaaactacatatccttgcttgatttgggggttttgctttgttttgtttgtgtaaaaatttggtcttcttgagagacaagtgttcagtgtcctatgttgcacttgattctatcaaatactctttgtcaagcatgatctttctataatccaaaacaaattttggaccaaggacccaaactgaattaggcagagtaccttaataataaaacattaacaaagatatagtccaggaatacacatgattaatatcaaaatgaacattagatataatctcatcttggccgggtgcaatggctcacgcctataattccagcactttgggaggcttaggcaagaagatcgcttgagtccaggagttcgagaccagcctgggcaacacagcaaaaccctgtctctacaaaaataaaacaattgaaaaacaaaacgaacaaacaaaaaagaattaatctcatttcattggggaaaaagactaacgtgaccacaggcaccacaattattcaatatttttctcacctggtcaataaaatggaaggtaaagtttatccctctttgggaaagttagatgatttttatgttacattcaaagaaacaactaaaatatttagaagtaataagatagtaatttgcccaaatataacataaataaaagaatacactgtgtataaacactttgaaaatcttaggagtaatctagatcagtaatatgccagaaatatgagcattctcaatcaaaaagtggaaaataaatcttgaattagtagaatgaaattccatgttcttggatggaaagacataatgtgctctcaagatttgaaatttcctcaaataaatttgtagattcaattcattatgaatcaaaattgcaagggactattttaggagctatacaatttgcaacaaattttaactacattgctcaagaaaatccaagtcattttcccacttttttaaatgaaaagttttcaacatacagaaacttagccatttatttaaaaaagaactggattaatttcctacctaatttcctaaaacctaatacagcaattaaagtgtgtagcacaaaaaaagaatagtcacacatatcaatggttcagaacattgtccagaaaagttatttataagttggaaattcagcaaattagaatataattgatcaatattaaggatctagaaaaacagatgaatgatttgggaaatatacaattggatggccaaatcaaatcatacagacaaatttcagggcaaaaagaaaaaaattaggaagagatggaactctcttttctcacacacagaaagaaatagcagaggcgcatttggccacaaacctgatggctaatcctatgtggactcttggcttgagcaaaaagaggggagatgcctccccaagatccatgtaccctgaggttcagtgagatttcattaactcactaaacctttgccagcattgacctctgtggtaaccactgccctgaactgcatatattctttcaaggtttttatcgctcccctggaacacagagcagaaggtagggtctacatcaggtatgtgattatagggtcagtatcacatctcagaatccaattctcagatccacgtagctattacaagggagggtccagctgagaaaattcactagtaaacacgccttcttctgtagttgagtctggtgtttattccaaagagtattatgtggatttgaaggtcagaatccttaataacatgtaattttctgctgcaccaattctaataaaattctggacaatgccttgaaattttcacgcagtgcatacacaaaaatgttcagtataatgaattgcccaagtgcagtctcaccttgacaaggtccagtggaaacaaaagacactaacatttatttaagatagcttgtgcaccaggcctacaattttctctattttaatttgaattaatcttgtccccatgcttaaagaatctcaggttaagaacaaacattctgcagaaggatgggctaaaaatcaaagaacaaatcaaggaacagaggtggaaattcagacagaacttatacagggaaagagttaaggagacattgcaggaaaatgggtaagaaaagtaaataatctgcaaagaccagagaatatctcttcacagtgaaaatgggctctattatgactctggtatagtctcatgaaaaagcattaatggtccagacattgtatagattcccatgtctaaatattcaccccttttctttcccagacgatttttaagtctgaaataaaaactccactcacctaagtaacctccattccaggatgttgtacctaatgtttaccagatttgtcctgagagagaaagctaagcctttagttttcattgccttgacctcatctctctctagagctgtgattattatgttatttctagcatcagtgatagtgtctccaagaaaaatctgtacacattttttcttagcataattaacttatccaaattaattatgagtgtttacagagaacatcccaagatgctgccagaggtagctggagaaaaagttttctgaactccctataggggtgaggtcaaataattatgaggcctaaaaagtgagggattggagaataaacacatgattctggctatatttaaaaaaaactctaaggggtatatttcttagaagagaatttttgggttcctaaaaacctgatgaattctacctattaaagatttagtagaaaaaaaaagagaggagaggcattccaaagatagagcatgtgggacatataaacaaggtagcaagtgttgacctagaacccattataagaggtaaaataaatgagatgaggtggtgtggtgggaaccaacctactatggaccaagagtgtgtgggggtgaggaaatggagggagggagtgtggaccactctctcagtaaatatcattataaaggggtacccagggattgatgaggttaagggagaatttaaatactcatagaaggctgggtgaggttggcttatgtctataatcccagcactttgggaggctaaggcaggaggattgcttgaacccaggagttcaagactagcctggtctataaaatttttaaaaattgaaaacttagccaagtacagtggtacatgcctgtgttcctagctacttggaggctgaggtggatcacttgagcccaggagttcaaggctgcagtgagctatgatcacactactacactccaacatgagcaacagagagagatcctgtctctaaaataaataaataaataaatacttacgggtaagatctggcagatcagaatgtgttgaatttaagtaaacatatttacatttgttagattgaggcctatcattagtttaaaaagagtataatccatggcataagtaaaggaattaatcttaattttaaagaggaatatatcactcattaacataaatttaggaaaaaagaatgagtgtaaagtcaggattaatctgaattgtgtaaggaaatagagggatttctcaactaggagaggctgaagatggcttcaacttctcttaagaagcaggagacaagcatatttgaaaagagatagagaagcatagagacctgagagtaattgagaatatttgaaagcacagcagtggataatggcaggaagagttggaagatgaaacagaagagggctgttgggcagaatcatagcagggattcggattattgccaatgaaacatttatgactgatgccaatctacctagttgcttattcagctacacaagacttctatagtgtaactatgggagaagggaaatggagaccagattcaattaatatgttttccagttcagagtcatggaatgacaataagaaaggaattatggataccgaaagaaatagaaaggattgacaaaaatattacactaaagagagaaagaaagattgagatgaactggcatgacataaattgagactatatattaatggcccagaagccaatgaaagagaatagaaagatgtgtaggaaaaaaagctgcaaacatctacatggagaccccctagagtcttcataggacactaaattgtgcattcatagggtgaaattccataggattgggcatttaaaaaccagaaaatggtgaactaaacaattcccagagctcaaagacggacaatgttcaagatatgactggcttagccaggcgcagtggctcatgcctgtaatcacaacactttgggaggccaaggtgggcaaatcatgaggtcaagagttcaagaccagccctggccaacatggtgaaaccccatctctactaaaaatacaaaaattagccaggtgtggtgggcgtctatagttccagctatctgggaggctgaggtgggagaattgcttgaacccaggaagcagaggttgcagtgagctgagatggtgccactgcactccagcctgggtgaaagaatgagactccatctcaaaaaaaaaaaaaaaacaattaagtcactggatgggattaacaataggttacacaatggagaagaaaagatcagtgaattagaagaaatagcaacagaaactatccaaaatggagcaaaaggtgactatcatcataaagacaaaagatgacaagcattgctgagggtgtagagaagaaggacccttgtacattgttagtgggaatgtaaattagccattatggaaaacagtactgaagttcttcaaaaaattaaaaatagagctaccttagatctagcaatcccacttcggagtatatatccaaagaaaaagaaatcagtatctcaaagagatatctgcactttcacattcattgcaacattatttacaatagccaagatatggaaacaatctaagtgtccctcaacagataaatggataaagaaattatgagacatatatattatatacatatatataataaaatatagttcatcttttagaaaaataaggaaatcctgccatttgtgacaacatggatgatcctagaggacattctactaagggaaataagccagatgccaaaagacaaacactgaatgatctcactcttatgtggaatctaaaaaagtcaaattcatagatgcagaaagtagaatgatggttacaaggaacaggagtaggcagagggatctaggtcaaagtgtacaaagtttcagttatgtaggatggataagttctagaaatttaatgtacagcatggggactattgttaataatactgtattgtatacttgaaatttgctgagagtacatcttaagtgtactcatcaccaaaaaaatgctaactatgtagacagatggacatactaattagctcactgcagtaatcagtttaccatgtgtatgtatatcaaaaaatcatgctgtacatattaaatatacacaatttcaattttttaaatagagcaaaagagataaataaaatattgaatttttttgaaaggaacagagcttcctttacctgttaaatactatcaaatgggctgttatacatgtaattagaatcccagaaggaaaaaaggaaatatacatacatgtgtattttctgtttttgtttttgtttttgtttttgagacagaatcttgccctgtcacccaggctggagtgcaatggtgcgatctcggctcactgcagtcttcacctcccaggttcaagtgattctcctgactcagcctcccgagtagctgggattacaggcacccaccaccacacctggctaatttttgtatttttagtagagatggggttttgccatgttggccaggctggtctcgaactcctgacctcaggtgatctgcccacctcagcctcctaaagtgctaggattacaggcgtgaaaactcagatgttattgtgggaaaggtctgctgccagatttcagagaaaccaccaagaattttggtaatcacatgatgtagtgataatgggatatagtgacaaaattggagatttgagagtcctcaaatactaatacccagattcttatgctacatgcaggcacagctaaagaattaagctgaaaagctctttaaaatagtatgaaaattcccaatttttacataacaaagaagcaaagtaccataaggcttttatatgaatgccatcaacagccatgccctaagaatgtgagcaaatgtgagcaaatggagatagactaaatcttgcaaactttgcaaataagctctgaccacactcagtaccagctcagattaaggtgatcaactgcacaactgtctaatacagaaaaaaggtcacctaaaacaataaggcttaatacaattaaaaattatgagacattctaagatgcaagaaatgtgactaacaatcagcaaaaacaatatcaaatttaagcaaacagatggcccacatattggagatagtagacaagggctaaatatatttcctcaaagaatgtggggctgtgcattttgcttggctccaagggactggcacagactcttgccttggttttggctctctctactgcagtagcttctccagcagcagcagcagaagctctaaagggacagaacactttcctccctactctttggactcagacatttaaggaaatctttgataggtctaactacagagatagccaaacagaattttcaatgatcacacacaaaaggaataaacactctgcaaaaaaaaatttgagaaagtcacaaatggatgctctaatcctcaatgagcaaaaatcagcagtctctgaggagttagagaatcattttttcagaattaccacattataatattgacagtatccagctctcaaaaaaattactaagcatacaaataaataggaaaatatggcccattcacaggaaaaaaaaatctgatagagaccacactcgaggaatccctgacgttgcaattactagtgaaaaacattaagtcaacttttaaacatgctcaatgagtaaaggaaaccatgaataaagaactaaagaaaacctgaaaattacgtgtgaataaagtgagaatacccctgaatacctataaagatatagaaaggaaccaaacagaaattctggagctgaaaagtacaataagtggaaaattcactagaggtattcgacagcagacttgagcaagaagaagaaaggatccgtgaacttaaatttaaggccatcaaaattattcagtctaaggagcagaacgaaaaaaagaatgaagaaaatgaacagagtcccagggatctgtaggacaccatcaagtgtaccaacatatgcatcataggaattctggaaggagaagaaaggagcaggaaaaaattaaagaaatagtggctgaaacttcccaaatctgatgaaagacaagaagctacacctaagctcaacaaattttatcttaactacatgtaaactcaacacacttcaagcaatataaagtcaaagaaatttacaggtagatttacaagtgaatcatcacatatgatagatgctcaataagatgaacagttgatttctaaacagaaaccacagaggccagagggcaatggtatgacacatttaaagttctaaaagaaaaaaactcaaccaagaattctgtatctagcaaaactgtccttcaaaaataaaggagaaattaataaaggagaagcataaaaactgaaggaattcattaccagttgacctgccctacaagaaatgtcaaagggactcttcaggctgagataaaaggatattagacaggaacttgaagccattagaagaaataaagaacactggtaaagttaactacacaggtaaatacaaaatacaatttattgtaattcttctcttttcctttgtgatgtaaaagacaaatacatagaacaataattatgttattgttctattgtctatgttaatgagaattcagtgtgtaaagatataacttatgagaataacaatataaaggagaaagaagagaaatgaataagagcagtgtttgtactctattgaaactaagttgttattattcaaactcttaaacagccaagggtcaaaaaagacagcacaagagaaattagaaaatgccttgagacaaattaaaattaaaatgcaacatactaaaacttatgggatgcagggaaagcattactagagggaaatttatagctatgaatgactacattaaaaggagaaaagttctcaaattaataacctaactttacaccttaagactctggaaaaagaaaagcgggctaaacctaaagttagcataggaaaggaaataataatgattagaccagagatacacaaaatacagaataaatgcaatagagaaaaatcaacaaacctaaaattggttctttgaaaaaaaatcaacagaattgacaaacctgtagttagattaagaaaataaagaaagaaaactcaaattactaaaatgagaagggagagtgagagcattactaccaattttacagagataaaggggattattagagaatattatgaacagttgtacaccaacaaattggataacctagataaaatggataaattcctagaaacacacagtctaccaaaactgatgcaagaagaaacagaaaatctaaatagacctataactagtaaggagattgaatcaatactttttttaaaaacactttattaaacccctccaaagaaaatctcaggaccagaagccttcattggggaattctacctaacagttaaagaagaattaacaccaactcttctcaaattctttcgaaaattgaagaagagggaggactacctcattcattctaagaggccagcattacgctgatacaacagccagacaaagatactaaaagaaaagaaaactacaagccaacatccctaaggaagatagacgtcaatatcctcaacaaaatactagcaaaccaaattcagcagcatattaaaataactattcactatgatcaagtgggatttaccaccagaatgcaagagttgttaaacatagaaatatcaattaatgtaatacaccacattaatattatgaaggaaaaaaacccaagatcatatcagttgatgcagaaaaatcatttgacaaaatccaacagtgtttcatgataagaatactcaacaaattaagaacacaggggaacttcccccaacatgataaagatcatatatgaagaactgtccagatgcagtggctcatgcctgtaattccagcactttgggaggcagaggcaggagggtcatttgagccctgggtggcatggtgagactccatctctacaaaaatatattaaaagaaaatagccaggcatggtggcatgcacttgtggtctcagctactcaggaggctgaggtgagaggccgaggtgggaggattgcttgagtgcagaagttgaggctgcagtgagacatgtttgtgccattgcattccaggctgggcctcaaagtgagaccctgtgtgaaaagaaaacccacagctaaaatcacactcaataatgacagaccgaatgtttttccctggatgattaaaattttctaaatctggatagtgatgacggttccataaccttatgaatatactaaaaaccactaaattgtacacttttataaaagtatgcattttatgttacttatatctcaataaagctgttatttaaaatgaacatgatatggtctccaccaccaagaagcacagaaacaattttggaacgttacagaattgaaaaagatgatttctcagcaacaaagtccttatgtgcacaataaagtgattaatatttcccaggtgctttgataagaaatatatattgagagctagctatgagagaagtcttctcttgtttcttttgtttttttttcttttttgattgttactttaacttttttctagagaatctgtttaaatgggaaaatgccaaggtaaatattctctattgacatgattcaacattttttgtataaatactgataaatgcttatcgaattaattcatatttaaaagaatggacatttacttgggtcatattggtgtttctattggtgagaattttgacaaaaccgagatgcaccttctttttttttgttttttgaggattgtagttttttttttattattatactttaagttttagggtacatgtgcacaatgtgcaggttagttacatatgtatacatgtgacatgctggtgcactgcacccactaactcgtcatctagcattaggtatatctcccagtgctatccctccccccgaccccaccccacaacagtccccagagtgtgatgttccccttcctgtgtccatgtgttctcattgttcaattcccacctatgagtgagaatatgcggtgtttggttttttgttcttgcgatagtttactggggatgcaccttcaaaggggaaatgaagaataatttatttatttttttctaatttttatttatttaaaaaaaattttttgagacggggtctcactctgtcacccaggctgaagtgcagtggcgcaatcttggctcactgcaatctccgcctcccaggttcaagcgattctctcaccccagcctcccgagtatctgggactacaggcacctgccaccacatccagctaatcttggtatttttagtagagatgaggtttcgccatgttggccaggctggtctcgaactcctgacctcaagtgatctgactgcctcagtctcccaaagtgctaggattacaggcatgagccaccatgcccagcaagaataatttaataaagagagtatttacagaaatgtatggacagggttaagggaaaccaacaagggatagcaaactatttgaagctagcagcaccgatagccattgcccctcctcctagaccagaaggagttgaggagaaaatggttaccaaagcccaggatacagcaagacccaagacagcctggcagagaggggctggaggaatgaatgctctgacatcattgcaactaccctttcatcctctgctgaagcctcccattcactgacctcatccaaagccaagaggtgagtccactgatgtaatctacacaggccagcctcctgggcacatagtagagtggagaaaggtaaagggtggacctaggagggaaaatgaaaaacaggtggcagagatcaatctatttgctcctcacttgctctttagaatgggggattccagccaacccaggtttttaaccaaagagctaaagacacagagggaaaggatggagaacgctctttgttggcacaactgcagtaattgcacttgatctttgtccagatgaaaaaaaaatctactgtcaattcagccatatttccatcagaggtcttcataaaaggccgcagaaatgtgttaaagaaataattagtagcgggatgtggtggcacgcacctgtaatccccacctacataaaaggcaggaggatcacttgagcccaagttcaagaacagcctgagcaaaatagcaagacctggtctcaaaataaagaaataaataaaaaatttatttttaaaaataagcaattagcaaatataaaaaagtggctgctatagtcaccacttctataactagtcctgacgccagggtgctgaatacataattaattgattgattagaaatgcaagagactattctgtcattaattataattgcatgcatgcagttgccctggatatttcctgtgaaagactttatcatcttaattatagatcttccaaaagagacagccttaaataaaatgtatagatatgtctctcttttgcgcagggggtggaggggtacttagcacatggacacctttttgtgtttagagaattcactattttattttattttatttttgagacagagtctcactgtcacccaggctagagtgcaggggcgtgatctcagctcactgaaacctccacctcccacctttaagcgattctgctgcctcagcctcctgagtagctgggactataggcgcacaccaccacacctggctaattttgtatttttagtggagacgaggtttcgccatgttggccaggctggtctggaactcccgacctcaggtgatccactcgcctcgacctcccaaagtgctgggattataggcttgagccactgcacctggctcatcagaccatttcattgtcatgttttgaacattgttctggggggcttagactctcaatggtttgttaaggagctcttttaaaaaaaataaactctttgtatttttaatcagcctgattcagcttctgttgtgtgtctgttacaaagaagtaagtgaatttacaacatcttgtccaattaaatgggatttaaagcaggaacttagaagctacctaaaaaggagttattaccttagaattaacaggctgttggatgtcagggcccatgttaggaaagattatgaagattaagaaaagaagacccagagctctgctcagattaactaaattcccaagctgtaaagtaattaccccaagacccatggtcaaaagaaatggattatgatccctgatataggaaaaaaaaaaaacaaacctacaaaacccagaataaggaagagataagcgaccaaaaatataccatccagatcattaaatcatttggaattaagaaaatgtttactgcagtactggttctcactcctacaaaaaaagaaaggaaggatagaaaaaaccatattggtttttggtttttttgtttgttttgttttatcagagaactttgaagtatttagcattttaacctggtctttaatggtccaatatttctctaccatgactggcaagatttgtgtggctgggaatttaatcagaaaagtaaagagaagtgatttccccacaaactctcagatacacgtggcagatgtggttggttctggatcttgaatatagcaccattataatgtagagaaggcaaagcaccataggactgtaacttgcaaaaattttcatgcaaagattgctcccccagggccaaaagttggaactttaaaattatttatggacccaatcccctttctgaaggtgagttgatgtacccctgtgcagtagtatttgtctattacatttttcatcagagagtactttagacaccaagctttcttttctgagtggctgcgtaaatttatagtcttagcactctataacaaggggtaagcatagcaatgaaatatcactgaggaatttattgatcctttattgagatatggcgacatgattgcaggacagaaaagaatggattcttgtcaaagccaggatttgaattcagccagttcacatttttaaccatactatactgtatcttggagggtctgaaggatgcacaagacaaggtgaattttttgccaagaagtccacactcaacctctggggtaggctgaataacggtccccaaagatgttcacatcctaacccccagaacctgggaatatactgcagtttcccttacatggcaatagggatgttgcacatatgaagctaaggatttttttttttttttttgagacaaagtcttgctttgtcacccaggctgaagtgcagtggtaccatcctggttcactgcagcctcgacctcccaggctcagcaatttacccaccttggcctcccaaagtgctgggactacaggcatgagccactggactggccgaaattaaggatcttgagatggagagattatcccgaattatctagtgtgcccaatctaatcaccgggtccttataagagagagaagatgtaaggacaaggcagaggtcaaagaggagagaagaagccacgctgccggctgtgaaggttttactcgtagtgactgtgaagccactgccagtaataagcagagaagaaacaggatctgatttgcatttcgacaggagaatgacttcgcagggaagggatagaagcagagagtccagttagaaaactattgcaatatcccagggaagaggtgatctgtgtcctggcccaggtgttagcatgtggaatacttcacagataaagccaatgggatttgccgacatatcagacatgacatacggaagaaagagaggagtctgtcaaagatgactccaaagatttcagcctaagcaaagggaaagatgcaggtgctgttaactgagacggggaagcctgcgggataagcaggtttgggacggaagatcaggatctcagctttggatacaagtaatttgagagcccattaaacattcaagtgcagaattcagaggagaggtttgcagtgccaatataagtttgagactaacggtggatacagagataccctgtccagatccctcttccaagcaggatttgctgcttcagccactgggagtgctgtcagcagacaactttctgctgtcaagtccttcaggaccagcctcaattgcagagagctgccttgaccaaatgcacacctctccggggaaagccccagtaaggaatataaggcccagcaatctgagccaaacagataacaagtctaataagctattctcttcataaatttgtacggctaaaacagaatacctgagactgggtaatttacaaagaacagacatttattttctcatggttctggaggctgagaagtccaagatcaaggcgctagcagactcagtgtctaatgagggtcttatctgtgcttccaagatggtgccttgaacactgtgtcctccagaggggagtaacactggtagaaggcggagggcaaaaaaggataaactcccttcatcaagcccttttataataccattaatccattcacgaaggtggagccttcatgacctaaacacaccccaaaagtctcacctcccaacactgttggattggagattaaggttccaacacacgaattgtgggggacacattgagaccacagcagctatctatgctgcagagctcttgcagggttgaccatggccaaggttgtgccacgtctaattcaaattctccatctgctcaaccctggctcccctctcccttccacaggcgtcaacccctaataagtctcttgcaccccaaactgcatcttagtgtctgcttccagagaactcaaacaacaacagccctcaacagcatatagacggttatgcaaagcctagaagttgcatttaccttattaacaggttcttaaagtatttcatgccaacttcccaaaaaaatagactcttctctgtccagtgagcctaacatcctgacctggagaggcaagagcaggattttttaaaagcacttcatagaggccacagtaggaaaggccaaagatgcccaaactcatcagtattcagaatattctaattaacacacaatgaggccaggtacggtggctcacaccagtaatcccaacacttagggaggccgaggtgggaggatcgcttgagcccaggagttcaagacccacctgggcaacatagcaagactctgttctccacaaagagaaggggaaaacccacaacggcataccatttcatacccagcagactgtcgaaatgtaagtctctcaatatcaggttttaatccatagaataaaataaatatccacacttctcggccgggtgcagtgactcacacctgtaatcccagcactttgggaggccaaagcgggtggatcacttgagatcaggagtttgagacctgcctggccaacatggtgaaaccctgtctgtactaaaaaaaaaaaaaaaaaaaaaaaattagccaggtgtggtggcacacacctgtaatcccagctactcaggaggctgaggcatgagaatcacttgaacccaggaggcagaggttgcagtgagcagagatcacaacactacactccagcctgggtgacagagtaagactccacctgaaaaataataaataaataaataaatcacacttctgcatggatcgaaataaaaaaataaatacatgaggagaagggatggttctatctttcagtagatttacaatttataaatgtaaaaggagaaaggaatatgaaaaattaccattagtcaaatgtcacagcaataactgttgcagacaagatccaccaatggatgctaaaatttgtgggcaaaagtttgagaaggaaaaagacttgtatagtctcaaaaaatctccttcaagatagtttttaattaccaaggggaaaatagtaactttacagtggagatgtgcagcatacagcaatttaagtgatcaaggtcagcatcaccagcaataagatacactgacatcaggtgcctcctgatatcatgcactgagaaggacacaacatcatttctgtggcgttcttggcaaaaactcataactttagtccagtcatgagaaaatgtcagacaagcccaaattgaggaatatcctataaactaactgatcagtaccattcaaaagtgtcaaagtcagttgggcatggtggctcacacctataatcccaaagctttgagaggttgaggcaggaggattgcttgaggccaataattcaagatcagcatgtgcaacacagtgagaccccatcctgacaaaaaaaattagccgggcaccatggcatgtggctgtagtcctagctactcaagaggctgaggcaggaggatcctctgagtccaggagttgaaggttgcagtgagctatgatcgcaccactgcactccagcctgggcgacagaaagagaccctacctcttaaaaaagcaaagtgtcaaagtcatgaaacacaagcaaatacagaggaaatgttcctgtctagaagagacacaacaactgaacacaatatgggagtctggaacagaaaaaaggaaaaaaaaaggacatcaatagaaaaagtgttaacattcaaataagattggtagtttagttgatactgtgataccaatgttaatttcctagttttgatcattgtgctatgctaataacaatagggggagcaggatgagagatatgtgggacctctctgtactatctgcacttttctgcaagtctaaaattatctagcattacagcttccacctcactctctgcgttaacttgctcaccatctggccctccccacagtccccatcatgtggcctagcttcccctagagcaagtggacccagaggagtgtgagtgagcccccttggaagggcattctccagttcctttaaacccttctgatgactgaaccccaggccagtgccttcgaaccagaaccatgtggataagctgctctcaaatacttgacccacaaaaagtgtgtgagacaataaatgtttactgcttttacctcccagattttctttttgaaattcagaaagttgttgttgcacataatgacgactagatggcaccagaattccaaggatagaagcaggctgccagcatcatgaactcaattgcctctgagtttgtttacaaatttattgcaatcccaatacagatatcatcaagggttttgtgtgtgtgtttgtgtgtgtgtgtgtgtgtgtgttttctttttttgccccagagctagaaagaagcagtagcagccgtggctgccaccaacttaggcagtagctctaccaaatacttaaaacgatataagtggccaggcgtggtagctcatgcctataatcccagcactttgggaggctgaggcgggtggatcacctgaggtcaggagtttgagaccatcctggacaacatgatgaaaccccatctctactaaaaatacaaaaattaactgggcatggtggtgggcacctgtaatccctgctactcgagaggctgaggcaggagaatcccttgaacccgggaggcagaggttgcagtgagctgagtttgcaccattgcactccagcctgggtgacaagaacaaaactccgtatcagaaaaattaaaaataataaaaataatacaataaaaataaaacaatatgtgcccttgccatggttggggctaaaaaaaaaaaagtaaataaaaacaatattttaaaatgtgttactgatgcataaataagcagacagatcaaaagaaggttagaaaatccaaagacagaagcaattgctgatggagatttatatgatgatatagtaatttctaattcaggaagggactttagaaaaggttttaatttagtagtgtagaaacaactagatgaccacgtgaaaacaaagaagcttgaatgcatttcccaccccatataccagattaaatcctaaacatatcaaagatctaaatgaaaaaacacagcctcacagataataaaacactggtgagttccctcattaccggggagggtgtaaattttccaaactattactcaagatccagaagccataaaagagaattttgttaaatgaccaaacaaaaaaaaaacaaaaaccttttgcgtggccacaaaataagccatacacaaccaaaaactacagatgacaaaataagaaaaatatttaccacttatatcacagaagagaaagagttaaaatccctaaaatataaagtgtctaaaaattaagggaaaaaaaacaagaaacctattgaaagcgggcaagatacataaacagagagttcacgttaaaaaatgcaaatgccacctaaatttataaaaatagccagacacagtggctcatccctgtaatcccagtactttcgaagggaaggtgaggggattgattgatcccaggagtttaagaccagcctgagcaagatgacaagaccttgtctctaaataaaataaaataaattagctgagtgtggtggcacacacctgtgatcccagctactcgggatgctgaggtgggaggatgggaggactgctggagcccaggagttcaaggctgcagtgagctatgattgcaccactgcactccagcctgtgtgaccgagtaagaccctgtctcaaaaaataaaaaataaaatatcacacctgtaatcccagaattttgagaggctgaggcaagcagatcacctgaggtcaggagttcaagaccagcctggccaacatggcatggtgcatgccatgttgcagccaggcaacatggtgcagccaggcatggtggcatgcacctgtaatcccagctactcaggaggctgaggcaggagaatcgcttgagcctgggagacgaaggtggcaatgagccagccgagattgtgccactccactccagcctgactggcaaagcaagagcctgtctcaaaaaataaaaaataaactaaagctcagcctcactcataataaaagaaacacaattaaaactgccctgagatcctatttctcacctaacagattagcaaaaatccaaatgttggacagccctcttgttggcaacgctgtggggaaacagggactcttccattttactgatggaatataaaaagataaaacctccatggaggagaatttggcaatatctagtgaatttgccctttgactcagcaatcctacttctaggaattaggtccaaagacacagacagaaataggaaacttcatatgaacgtgcctcttcactggagccctacgcatgatagcaaaaaactggaaactattgcaatagccatgaagagggtgctgcttaattcaactatgctatatccacaaatacagagcactgtacagctgtgaaaataagatatattaagattacatatatatgtgatgtgtgtgtatgtacaagtgtgtacacacgtgtttttttgttttgtttttttgactatttgtttgttttgttttgttttgagacagtcttgctctgccgcccaggctggagtgcaatggcacgatctcagctcactgtaacttgcacctcccaggatacaagccattctcctgcctcaacctccctagtagctgggactacaggcacgtaccatgacgccctgctaatttttgtatttttagtaaagatggggttttgtcatttttaccaggctggtcttgaactcctgacctcaagtgatccgcccacctcagcctcccaaaggtcctgggattacaggcgtgagccaccacacccggcccatgtgtacacacatatatagtcacctccaagatgtagttaagtgaaaaaaccaaggtgcaaattggtatgaacaggatgtaccttttgctcaatagagaggaaaatgaatacatatgttcattggtttatattttccaagtaaatggaatgtcaaaacaatttttgcgattgggactcaatcacccacaaaacaatggttttggttttttgttttcttgagacagggtcttgttctgtcacccaggatggagtgcagtggtatgatcacagctcactgcagcctccacttcctgggctcaagcgatcctcccacctcaacctccagagtagctgggactgcagacgtgtgtgaccacgcccagctaattttttactttttatagagatggggtctcattatgttgcccaggctaaaacaatgtcttaaagtaatttaagatatattaatttgacataaatccctaatggggtatatcctcctggaaaaaaaagcaccataagaaaatcttaaactatatttagtcatcatattactagtgatagtattgatattttaaaattttatatatgcacatatatattcagatatgcatatatattcacatacttcaaaacgtatgctgatgtcactacaattcaaaattctctttttttctttgagaattcaacattctctgaataagaaaaaagaggcataataataacattttagaagttgtaaagggcaaaactaaactatggacacacatttggataactaattactataaagaaacacagagatgattgctataaaagtcaggctggccaggcacggtggctcacgcctgtaatcccagcactttgggaggtccaggcgggcggatcacctgaggtcaggaattcaagatcagcctggtcaacatggcgaaaccccatctctactaaaaatacaaaaaaattacctgagtgtggtggtgcacatctgtaatctcgctactggtgaggctgaggcatgagaatcacttgaacctgggaagtggaggtagcagtgagccgagctcatgccacctcactccagcctggatgacagagtgagactctatcttaaaaaaaaaaaaaaaaaaaagtcaggctgagggttaattttggtagagagaagggaggggctgggcctgggcgcctgggctagggcacgtggagaggcttatgaacagctggcaaattctatttcttgacttacatgtggttacaagtggcttgccttaaaataacacaatttgtgtgtttcgctgaatttcaggaactcctattttaagaacttcctggggttttttttttttttttaacaaagaaatgtagtactttgttttttaaaaggaagatttttattatatgaatcaatacctaataaattagaagcaaagcctcttgcagagaaaaagatccaccaataaggagatctgcgtttcttcaggggaaaaaaaaaatcatctccatcacagaattgaaaacaaaggaataatcgtacagatttgggaagctggggactttgcctttgttttccttattttaaattaggaatgctggctgatgaaatcagagcaccctgtgaaaagaactgtaccagacatcttgatcagcaccattttgggcctctgcaatgtcaaataaatttgaatatatttttgcttttacaacgttatgctagctgtgaaaccacttgaaatgcagcatttcctgacaatgacaaagctcctccacgggaaactctctttctttctaatgtgttaagaaatagacttacatcaaaaagaaaagcattctctatgaaacacaaacgctttggaagtgtctaaaggtgccacaaaggttgcaattctctctccacttgcaagaatttttttttttttttcccgagatggagtcttgctctgtcacccaggctagagtgcagtggcttgatctcggctcactacaacctccacctcccaggttcaagcaattatccagcctcatcctcccaagtagatgggattacaggcacatgccaccatgcccggctaatttttatttttagtagagacggggtttcaccatgtttgccaggctggtctcaaactcctgacctagttgatccacccacctcagcctcccaaagtgctgggattacaggcgtgagccaccaagcctggcctttttttttttttttttttttttttttaaagacagggtctcactctgttggccaggctgaagtgcagtggtgtgatctcggctcactgcaaccttgaactcctgggctcaagtgatcctcctgccttggcctcccaaggtgctgggattacaggtaccaggtgagccttcacacccggctcacttacaagattatagtgagatcaaacgtggagaacttctgatccagattcaaatggtctagatttatattctggctccctcacttactagctgcgtgaccttaatcaaatcacttaacctctctgattctgtgaccacacacataaaactgagatatgacaatgcctacctcctagaggttgtcatgagaataaactgttttaacagaagtaagacacttaggacagggcaaagctatcttgagccttactaggccaagggaccagagaagctcagatccaagcactccatactgagtggccatgctgcaaaactcccacaaaccccaaatcaacacagattggctgggcaaggtggctcgcacctataatcccagcactttgggaggctgaggtgggtggatcacttgagcccagggatttgagacgaaagaaagaatgagagagagagagagaaagagaggaaggaaggaaggaaggaaggaaggaaggaaggaaggaaggaaggaaggaagttaggaagtttattctcttactgttctggaggtcagaagccaacaatcagcttccctgggcaagcaaacaagaaagagaaaagaaaggaaataacacagatttattctcttacagttctggaggtcagaagccagcaatcagcttccctgggctaaagtcaagtggttggcagggctgattctttctggaggcactgagggaagaccttatgtccttgtctttttagccacccgtatcccctggctcgtggccccctcctccttctccaaaagtggccctcggctgggtgaggtggctcatgcctgtaattccagcacttaggaagaccaaggcgggtggatcacctgaggtcaggagttcaagaccagcctagccaacatgacaaaaccccatctccactaaaaatataaaaattagccagacgtaatggtgagcacctgcaatcccagctactcaggaggttgaggcaggagaattgcttgaacccaggaggcggaggttgcaaagagctgagatcacaccactgcacttcgtctcaaaaaacaaacaaacaaacaaacccgcatccctctaatgtttgcttccattgtcacatcgacatccctctgaccaacttctcctgtgtccctcttgtaaggatctttgtgattctattcaggacccacccaggtaacccaggatcatttccccaactgaacaaacttaatcacatctgagagtccattttgccatataagggaacgttcacaggttctagggattaggatgtataaaccttcttaattattattaatacttagccaagccttgtggggcaagagaaactttttcttttcttttgttttttggttttgttttgttgttgttgttgttgttgtttgttgttgttgttgtttgagatgaagtctccccctgtcacccaggctggagctcagtggcacaatctcagctcactgcaacctccacctctgggttcaagggattctcatgcctcagactcccaagtagctggaattataggaacctgccaccacacccagctaatttttgttttttagtagagatggggttttaccatgttgactaggctggtctcaaactcctgacctcaagtctgcctcggtctcccaaaatgctgggattacaggcatgagccactgtgcccagccatgttttttttgagactgagtctcactctgctgcccagggtggagtgcagtggtgcaatttcagctcactgcaaactcctcctcccggattcaagcaattctcgtgcctcagcctcccaagtagctgggactacaggcacccaccaccatgcctgactaatttttgtatttttagtacagatggggttttaccatgttggccaggctggtctcgaaatcctgacctcaggtgatccgcctgcctcggcctcccaaagtgctgggcttacaggtgtgagtcaccgtgcccaaacttttttgttgtgttttgtttttgagacagggtttccctctgttgcccaggctggagtgcagtggtgcggtcacagttcacagcagcctcaaactcccaagctcaagtgatcctcccacttcagcctcccaagtagctgagaccatagatgcgtgccaccacacatgacttatttatttatttagtagagacaggatctcactatgttgcccaggctgctcttgaactcctggactcaagtgattctcccacctcgacctcccaactgctggcattacaggcatgagacactgcacccagccaggacatggaaactttggaggccacattattcagcctaccacagtctcaaagtgtggtctgattccattctgttggctgttttatttcttcaggtctcagaccttacgtggacctatgggtgctacttaggacgtaggtccagccagaagtcagagaaggctactggaactgccagttcaggacccttgagctcccctgttacatgcctttgtgcaaattaggaaaaggctgtcctcccttcctctgggtagacacagctccacaccaggatgtgtggctggtgaaagggcacaggttgcatttcagcctccacatgcctcctgggtcaaacaaatttgtgcagtgcacaacctatacaaccccagtttaaggcacagggcccccacctcaccctgatttaaaaaaaaaaattagggaagcatgcccagtcttattcttgtctttctcggtataatttagatctgcacaaactttctatcatgactcacacttcctgaaaccctggagcctcccagatgtgaaatcactgagagctggctcttcagaaacagtgactcctttaacaggcgggcttggaggacgtctcttgtgggtctaggtcttataaaactgactcctgcagggctgcctgggactggtgggaaacccttggtgactagggtcagggcttcgcagagccccagcgcagggtgagattggaagaattacacttccgcccaggcgcagagccctggcacagggtaggattggaagaattacacctccgcccttcggccaacgaccaacaccttcggagtctgcagaggtttggaggagtccgaggagacttcaaggcagagctggcaaggtctgggagggagcgtgggcttgctgcgttctccccgcgccccgattcctaccctcccgaaggagtagctgctctcttgtgggaaacccatccttcagcccttccacgcatagggagtggggtgggagggagagcacagcgccctgctctttgtgaaggctgcccccacagggacgctggcaggatccaccccataaacagtacagtctgggatcaacgacacagctctgtggatcctgggatatcccccgtcatctttcattctcatttttcttggacatactaaattcgtctcaatcggaatgaaattaacaatgatttttattttccacttgggtgttttttgtttttgtttggtgcgtagtttccaaatgttcaacaactaccatgaattacttttataatcataagtcaataatattgttataaggatgtttcagggctctgaaatcccagccggtaaccccagcactttgggaagccgaggcagaagtctgaggggcttgagaccaggagtttgagaccagcctgggcaacatagtgagatccccttctctacaaaaaaaaaaaaaattgaaaattaaaaaaatagccaggtgtagtggcacgctcctgtagtcctaggtactcaggaggtggtggaggtacagggtgcagtggctcacacctgtaattccagcactttgggaggccaaggcaggttaatcatttgaggtcaggagttcaagaccagcctggccaacatggtgaaaccctgtctctactaaaaatacaaaaaattagccgggcatggtggcaggtgcctgtaatcccatctagtcagggggctaaagcagaattgcttgaacctgggaggtggaggttgcagtgagccgagatcacgtcaccacactctagcctggacaacagagcaagactctgtctcaaaaaaaacaaaacttggccgggcgtggtagcacgcagctgtatcccagctactcgggaagctgaggcaggagaatcgcttgaacccaggaggtggaggttgtagtgagccgagatcatgccactgcagtccagcctgggcaacagagtaaaacagtctcaaactaaaagagaaaaaagaaaattttcagaaaataaaaacaatccctaatagtaatcacatcccgataatactgtgtgccaagatctgacccagaactgtctgtgcacttttgttgttgttgttgttgtttgtttttattttttcatacagggtctcactctgtcatccaggctacagtgcagtggcgcaattatggctcactgcagcctcgacctcctgggcttaagtgatcctcccacctcagcctcccaaatagctgggactacaggggcgcatcaccgcacccagctaattgttgtaatttttgtagagacagggtctcaccatgttgcccaggctggtttccaactcctggattcaagcaatccacctactttagtctcccaaagtatcagaattataggcgtgagccaccgtgagtagttctttttgtcagaatggcatttttcaggatatgcttaattggttagaaactaaaatgtggtacacccacacaatgggatattagtcagccacaaaaaggaatgaagtactgatccatactacaacatgactgagccacaaagacatgccaagcagaagaagaggcaaaagaccacacaatatatcattccatttatatgaaatatctggaataggccaatatacagagatggaaactacattcgtggttacctaggactgaacgacttgggggattagggagtgactgaatggatacagatacagaatttcttgttggagcccagacatggtggctcacgcctgtaatcccagcactttgggaggccgaggcaggcagatcacctgagttcaggagttcaagaccagcctggctaacctggtgaaactctgtctctaccaaaaatacaaaaattagccaggtatggtggggggtgcctgtaatcccagctacttgggaggctgaggcaggagaatcacttgaacccaggaggcagaggttgcagtgagccaagatcatgccaccacactccaacctgggcaacagagccagactccgtctcaaaaaaaaaaaaaatttcttgttggagtgatgaaaatgttctggaattgactgtggtaatggttgcacaactctggaaatatgcctgatatggtttgaatctgtgtccccacccaaatctcgtgtccagttgtaatacccagtgttggaggaagggcctggtggcagacgattggatcggggggtggagttctcatgaatgggttagcaccatcccctcagtcctgttctcgtgatagtgagttattattttgagatctgcttgtttaaaagtgtgtatgtgtagcacctcccccatctctcttcctcctgctctggccatgtaaagcgctggcaacccctttgccttctgccgtgattgtaagtttcctgaggcctccccagaagcagacgctgccatgcttcctgttcaacctgcggaactgtgagccaattaaacctctttacaaattacccagtctcaggtatttctttatagcaatgcaagaatgacccaattcaatgctaaaactaagtaatcgtatcttttaaattggtggattttataatatgtgaattctatcttattagagctgttcctaaaaataaaacacggtggctcacacctgtaatcccagcactttgggaggccgaggcgggcgggtcacctgaggtcgggagtcggagaccagcctgacctacatggagaaaccccgtctctacgaaaaatacaaaattagccgagtgtgatggtgcatgcctgtaatcccagctactcgggagcctgaggcaggagaatcacttgaactcaggaggcagaggttgtggtgagctgagatcatgacatcgcactccagcctgggcaacaagagtgaaactccgtctgaaaaaaataaaataaactaaaataaaaataaataaagcaaaaagcctaggggcaggaagtcgaattaccttgacttctacttactgtctgttacgtctagcacattgcctcatgacccaagacaattgcttgagctctagacatcacatgtaaattccaggcaatgaaagcaaggaaggaagaagggcatggcatctcccttgcaatgtgaattactggaacttgtgcaaacatttccatttacgcggttttagtgcggacacagaaacaaagccacatctagctgcaaagggggcttttcaatcccaccattatagggagtcatgcttgaagggggttggaagggtgttgaccaagccaatcccaaagcgaagttattaaccccactttaaagatgagtaaactgaggcgcagagagtggaagctgcctgcccaaggcctcagctattaggtggaaggaaaggaaaggagagccactgtgctcaaagattccggctcagatcaggaaattcatcaaagatgagccatcccactcacaccgagaccatactagaattagtgtgaccagttctggatatgtgtcccttaatagagccagtgaggacgtggtcagaacagagatgaggctgaggtttatgaaaggcaaacacattcaatggttaacccaggcctgaatcaggctgcctggatggacaggttgtttgttttttgttttttgggacaaagtcttgctctgttgcccaggctggagtgcagtggctcgatctcggctcacgacaacctccacctcccaggttcaagtggttctcctgcctcagtctcctgagcagctgggactacaggcacgtgccaccatgcccggctaatttttgtatttttagtacagacggagtttcaccatgttagccaggctggtctcgaacccctgaccttgtgatctgcccaccttggcctcccaaagtgctggaattacaggtgtgagccaccacgcctggctgatggacagtttttataagctgttatcaggaaggaatgcttttggctgcaataacaaaaaaaaattttttttaacctgatgaacactagctgaaacctataagaaattaattttatgcctatttttcaaggtccagaggaaggctgcctggaaccatttttctggctcaggtgagcctaaaaaccaagtccttatggaaggctcactcaaggccaggagttcaagaccagcctgggcaacacagcaaaaccccatctctaaaaaataaaaaacaaaattagccggcgtggcgacatgcatctgttgtcccacctacttgggaggctgaggcaagaggatctcttgggcccaggaggtcaaggctgcagtgaactatgattgcaccactgcactccaacctgggcaacagagtgacaccatgtctctgaaaaataaaaataaaaaaatacattttttttaaaacccaggcctctaggaatcagaggttttctgtgggtccctaaagaatgtccatttaactttattaatacttccttagagaatcagctccaaagacagctaaacataacacaagcggttagggcttcaatgtagaaactttggagggcacaaaacataataggggtgcacattggggtgacaaccagaaggaactgggaaatgtgattgctatgaaagacagcacaggctgagagtggtggctcactcctgtaatcccagcactttggaggccaaggtggacagatcacgaggtcaggagttcaagaccaacctggccaacatggtgaaaccccgctctactaaaaatacaaaaattagccaggcctggtggcacgtacctgtagtcccagcaactcaggaggctgaggcaaaagaattgcttgaatccgggaggcagaggttgcagtgagccgagatcacgccactgtcacccagcctaggtgacagagcaagattccgtcaaaaaaaaaaaaaagacagcacagtggctacccaggggagcagggagaggactgcaatggggaacacggcggggttcctggggtgcccagcaatgttctgttcttgaagcaagtggaagttaaaaggctgttgtcttatctcattaaggtagactttcgtttggtgtagctggcttccttccttccttttttctttctttttctggagacaggatctcactctgttccacaggctggagtgcagtggcactgtcatagctcactgcaacctcaactgcctctgctcaagtgatcttcccacctcagcctcccaagtagctgagactataggcacatacctccacacccaacaatttggtgtcattttctgtatatatgttttattttacaaccataggctgataaaataggctcccaggcccagcgcagcggctcactcctataatcccagcactttgggaggccaaggtgggaggatcacttgagcccaggagttcgatgctgaactcagctataaccatgccactgcattccagcctgggtgatagagtgagactctgtcttttttaacaacaaaaataaaaaataaaataaaaataaaaataagatgtgctcctctgctcctgcttcatcatccaaccctgtgtctttcttcctcctcgttgcaaaataactcctgcatctccaggttgcacatccacgtctccggcaggaagtgaagggcaaacatctagaaacatctagagtcttctccacataaagttttgccttaccatttagaaagaaaaccctcttcaggcccacaacaacctctgcctcccaggttcaagtgattcttctgcctcagcctccagagtagctgggattacaggcgcctgccaccaggcctggctaatttttgtatttttagtagagacggggtttcgccaggttggccgcagtagtctcgaactcctgaccttgtgatccacctgcctcggcctcccaaagtgctgggattacaagtgtgagccactgcacccagccaaattaattgattctttaaaccctgacatcttagagcaccgatccccaacctttttggcaccagggaccagttttgtggatgacaatttttccatgggtagggtgggtgaggtgggaatggggggatggttttgggatgattcaatgacattacatttatcaatagcttctcataaggagcgagcaacctaggtcccttgcctgcaccgttcacagtacggttcacgctcctatgagaatctaatgccaccgctgatctgacaggaggcggagctcagcttccctggctcacctgctgctcactcctgccgtgcagcccagttcctaacaggccatggacccatatcagtccatagcctgggggttgggaatccctgtcttagactactaagtcccattttcctgaattcttgtggcatcaatttttcatcagccaagcatctaaccctccagccacagcccttgaacaagcttgcctctggtacttcagctcgactaatcttctgcaaaatcagtggtaactgggccctgcccctccaccgtggatatggagaacggatgccctgcatctactcccaaggcctgcctactgtgccctggagtactgtagaagctggaaagctatttttaaaatagtaacttcaccactctcacccaaataatcaatacttaattgccaaatggttttcagtgcttaccctcctgtcttaaaatatcacgtagaccaggcgcggtcccagcactttgggaggctaaggtgggcagatcacaaggtcaggagatcgagaccatcctggctaacatggtgaaaccctgtctctactaaaaaatacaaaaaaaaaaaaaaatagccgggcgtggcagcacacacctgtagtcccagctactcgggaggctgaggcaggagaatgaagtgaacccggcaggcagagcttgcagtgagctgagatcgtgccactgcactccagcctgggcaacagagcatgactcagtttcaaaaaaaaaaaaaaaaaaaaagatgtaatactaatagaaaatttgaggctgggcatagtggttcctgtctgtaatcccaccattttgggaggctgaggcagaaggattgcttgagcccaggagttcaagaccagtctgggtaacacagtgaatccacatctctacaaaacatacaaaaattagccaggcatgttggtgcatgcctgtagtcccagctactcaggaggctaaggtggaaggatctcttgagcccatgcagtggagaccacagtgagccgagattgtaccactgcacttcaacctgggtgacagagctagacattgtctctaaaggaaaaaaaagagaggccaggcgcagtggctcatgcccataatcccagcactttgggaggcaaaggcaggtggatcacctgaggtcaggagttcaagaccagcctggccaacatggtaaaaccccgtctgtactaaaaatacaaaaattagctggatgtggtggtgggtgcctgtaatcccagctactcaggaagctgaggcaggagaattgcttgaacctgggaggcagaggttgtagtgagccaagatcgtgccattgcactccagcctgggcaacaagagcaaaactccgtctcgaaaagaaaaaaaagaaaatgaaagaaattttgaggtaacagatgaggagatgattgctatggaaaagacagtttgttactcacagttcccaagaggaaggggcatatgattccatgggggaccacacgagggagcccaagtcagttaggagaagagacagaggaggaaactgggcacgaacttttaccgtggttgccacaggaaggaattgctgatgctgcttctgaagtgaagtgttgctggggtaacactcacgaaaaaagcaggcagacaggaagcaaaagtcccttctcctggaggtgaccagcccccgtggaaggggttccgggatgcagaactttcagtgctaaaaatgggaaagatctggggaaagtgggacgagttgattaccctacttctgcagtctcctagcaaactgtcttgccagagcctaacatagaaccatctggcaaagcagaaatgtggcttgcttgtcccagcatcacaaagcagggcacaggatggtgcgtttggagctcagagacagtaactctgtaattgatactttttttttttttttttaaacagagtctcactctgtcgcccaggctggagtgcagtggtgcgatcttggctcactgcaacctctgcctcctgggtccaagcgattctcccagcctcccgagtaactggggccacaggcaagcaccaccacgcctgactaattttgtatttttagtagagacggggtttcaccatgttggccaggctggtctcgaactcctgacctcaggtgatccacctccctcagccccccaaagtgctggaattacaggcatgagccacctggcccagcctgatactgactgtttatgatcttcctggtcctctccaatccgtcctctgggctgccattgagaggagctttataagtagataaaattgatcatttcagactcttgccaaaagttttccatagttacctaccagccaaccagggtgaaatttcaactttttaatgaggtataaaatgttcctcaaagttatcctcagttacagcccagttttatctcctctcctgaacttgacattccagaaatatataaatctttgaatttttaaaaaataaatcatattctccattttctatgcttttaatacactagtccctcatccggataaaaagaagattagacgggggcagtagctcacacctgtaatcccagcactttgggaggccaaggtgggcagatcacctgaggtcaggagttagagatcagcctggccaacatggtaaaactccatctctactaaaaatacaaaaattagccagacagagtggtgtgaacctgtaatcccagctacttgggaggctgaggcacgagaatcactggaacctgggagacagaggttgcagtgagccaagatcatgctgttgcactccagcctgggcgacagagggagactctgtctcaaaccaaaaaaaaaaaagcatattaagcccccctttttagagatagagttttggtctgtcacccacgctggagtgcagtggcgcgatcacagctggctgacgcctcaacttcctggactcaagctatcctcccacctcagtctcctaagtagctggggctacaggcccacaccaccatggccagctaatttttttttttttttttttttttggagagagggtcttgccctgtttctcaggctggtcttgaactcttggcctcaggtaatccttccacctcagcctcccaaagtgctgggattacaggcatgagccactgtccgcccagccaaaccccttttttagaagaaaacatcagatcaaaagatgtgcttccactttaagaatggaagttaacttctgatcagctcaatgttagctggatttgaaggccaaagaaaattgaagcaaatgtatttttgaattacatagtatttactgttctcacgcttctgacacccaaggagaagaaagataacgctcccagtgctaatgaaacttgctaggttttctttcctgctaaagatatttatacttgaattcttttattttttaattttttagaagcagggtctcactgtatcacccaggctggaatgcagtagcttgggcagatctcactgtaaccttgaactccagggctcaagtgatcctccaacctcggtgttgagattacaggtgtgagtcactgaacccggccttaaattcattttaaggcttggaacagctttagattaattccataaatgaaaaagctgtggttgatttgaaaattagagatggtttataaaataatatcaggggatataaatgattctgcaatcatttaccaagcttttccttaaattcaaaggctaataagcttgcaaggttatctggttaaaagggtgattttgctttttgttttttttttgttgagacagagtctcactatgtcacccaggctcccgagtgcaatggttccatcatagatcactgtagcctcaacctcccgggatcaagcgaccctcccatctcagcctcctgagtagctgggaccataaatgcctgctaccacatttggctaattttttttttttaattttctgtagagatgtggtctcactatgttgccaaggctagtcttgaaaccctgggctcaagtgatcctccccacttggcctccaaaagtcctaggattacaggcataagccactgtgcccagcctgactttgctttccccactccccaccctttctactgcaacattttttcttttcaaatcaggtgatttctgacaggtcttcttcagtttttctccagcatgaattcctttgtgaagacttctgaggcaaactctaggctgtgtgggatcctattgaattcagtacctcccttccatgagctcgatggtaaatgtttactcaactgtctttccaccatgctaaaccttctgttgggcagaaactgtggctttccatcttcagattccacattttgagcacaatatcttccctatagtagacactcatcctacccttgttgaatacatgtaaaatgacttttgatgaaaccaaatttacatagagagaagggtggccacagggattcagggggaaggagggacatgggaagatattggtcaaaggatacaaacttgcagctataggatgaataggttctgcagacctcatgtaaaacttggtgactgactgtagttaacaatactgtattatatactggaaatttgctaacagagtaggccttacatattttcaccacacacataaacaggtgactgtatggggtgatgaatgtgtcaattagtttgattgtgatcatcatttcacaatgtattttaaaaatcatattgtaggttaggcacaatgactcacacttataatcccagcaatttgggaagccaaggtgggaggattgcttgagcccaggagttcaagatcagcctgggcaacacaatgagaccccatttccacaaaaaaagaaatttaaaaattgacaggatatggtggtgcacgcctagagtcccagctatttggaaggctgaggcgggaggatcactttgagcctgggagtttgaggctgcagtaaagtcgtgatcacaccactgcactccagcctgggctacagagatcgatcctgtctcatttaaaaaagaaagaaagaaaaaaaaaaaggctgggcgtggtggctcatgcctgtaatcccagcactttgggaggccgagacgggtggatcacgaggtcaggagtttgagaccagcctggccaacatagtgaaactccatctctactaaaaatacaaaagttggccaggcatggtggcgcacctgtagtcccagctactcgggaggctgaggcaggagaattgcttgaacctgggaggcggaggttgcagtgagccgagatcacgccattgtactccagcctgggcaacagagcgagacgccatctcaaaaaagaaagaaagaaatcaccttgtatatcttaagtatatacaatttttatttttaagttatgctttaataaagctgggaggaaaaaagatgttcaaatgcagccccagccaattcttattcaactttggccaagtttaggatgatctgagtttccgctgaatagcagagcagaagctatggcgtgttgtggctacaagtgagcgcgctggtgtcaagctgcttggtgagatagctgctggctgtttggccttgggaaagagattgagctcaccaggcctgaattcttttcctacagaagaatgatgttgacaacagtgcctcattcattgcatggaggattaactgaggcagtgaatgttcagtccagagtacagagctggagattttagacagaactgaaatattaggtgggctgggggcagtggctcacacctgcaatcccagcacgttgggaagcagagatggatcacttgagcccaggagttcgagaccagtctgagcaacatagtaagaccccatctctacaaaaaatcaaattaaattaaaaatcagctaggtgtgtgtgggtggggggagcacacctgtagtctcagctacctgggaggctgaggtagaaagatcgtttgagcccaggagttgaagactacagtgagctatgattgcaccactgcactccagcctggaagacagaacaagaccctgtatctaaaaataaaactttttgctgggtgcggtggctcatgcctgtaatcccagcactttgggaggccgagacagcagatcacctgaggtcagatgttcaagaccagcctgaccaacatggagaaaccccatctccattaaaaatacaaaataagctgggcatggtggcgcatgcctgtaatcccagctactcgggaggctgaggcaggagaatcacttgaacccaggaggcggaggttgcagtgagccgagatcgtgccattgcactccagcctgagcaataagactagaactctgtctcaaagaaaaaaaaaatttttttttaaataataaataattgaaatgttagctgttagagttctattctttgaaatgtggtaaatggcacttaactcacagtgttggggttttttgttggttttttttttagacagggtctcgctcgctctgtcacccaggctggagtacactggtgcagtatcagctcactgaaacctccacctcccaggtttaagggattcttgtgcctcggcctcccaagtagctgggattacaggcctgagccaccatgcccagttgatttttgtattttctgtagagacggggtcttgccatgttgcccaggctggcctcaaattcctgggctcaaatgatcccctagcctcagcctcctgaagtgccaggattacaggcgtgagccaccgcgcccagctcatagtattgttttaaggttaaaaaggtgtaatagggccaggcatggtggcacacgcctgtaatcccagcactttcggaggccaaggcaggcggatcacctgatgtcaggagtttaagaccagtcaacatggcgaaacctcgtctccactaaaaacacaaaaattagccaggtgtgatggcaggtgcctgtaatcccaggtactcaggaggctgaggcatgagaatcgcttgaacccaggaggcggaggttgcagtgagccaagatcgcgccactgcactccagcctgggtgacacagcaagactctgtctcaaaaaaaaaaaaaaaagaaaagaaaagaagagaagcagaaggggaagggaaagggagagggaaagggaaagggagagggaaagggaaagggaaggaaaggaaaggagtaataggttcggtgactccagtgatctggcataaagcaagcctttgcctgggaagtccctcacttaatgcccctgattgcctcctttagctattccggggcagatccgtcttcccaaaatgcacctcactaagcagctagtgctgccagttcttgtgtgtcactcagagaatagggttttccccaaaggaaagaccactgattatgtcaagagagctacaagccactaagcaacaatgcctttcatctccctgactttggctatgagttgctgggaaagccagtgtaacattcccaggcctggggttgtaccacctgggaaggagctggtctatggagcagagtgctggccttgagcttcttagtaacaaatgccactcaaaggacatacaagacaaggtcagccctctggtttttcagacaactgcccaggcccgctggttgtagtcctacgtccccagtgacttttacaaagagtgcagctgcaaagccgtgccactctgcagggccacatctccacagtgaagcccagatcacactctggggccatggctcagtctgctcatttgggagaaacccaggactcccagggatctagcagtaacatggaccacagtgcctgtgagggcccagcatggtggctcatgcctataatcccagcactttgggaggctcaggcagaattgcttgagcctaggaggttgaggctgcagtgagctagaacggtgacactgaactccagcctgggcgacagagcaatactctgtcttaaaaaaaattttttaaataaattgctgataacacaattctcacctgaaatgctctctctttgtagattagtgtatagcctgaattttaccattaggaaaaagaggagaggtggcattgaagcatttgttactaagcagaatgaactgcatgtgcaaagattcagaggcgacatgtgtagcagatttaagaaactcccataaattcagtatgacaagcatgtcactgttctataattttttatttttattggcaaataaaaattgtatatattttacttgttaaattgagatataattcacgtactataaaactcgtcgttttgtttgttttttgtttggtaggtttttttgttgttgtttttgagacggagtccggctctgtcacccagctggagtgcaatggcgtgatctcagctcactgcaacttctgcctcccgggttcaggcgattctcctgcctcagcctcctgagtagctgggactacaggcgtgcaccaccaggcccggctaatttttggatttttggtagagacagggtttctccatgttggtcaggctgatcttgagctcctgacctcaagttattctcctgccttggcctcccaaaagtgctaggattacaggcgtgagccaccgtgcccggccaaaatttgccgttttgaagtctacaactcagtgggttttcatgtattcacaatgttgggtgaccatcaccactaactcaagcacattttcaccaccctgaagagaaactctgtacccatcagcagccacttcctgctttccctttcccccagcccctggcaaccaataacctactttatatctctatggatttgcctctctgaacattttatacaactggaaggatacatttgtcgtgtgtgtgtgtgtgtgtgtgtgtgtgtgtgtgtgtgtgtgtgtgtgtctgtgtgagagaggggagaggggagagggaaggggggagggggaggggggaggggggagagagagagatggtcttgctatgttgcccaggctggtctcaagagttcaggcctcaaacgatcctcccacttcagccacctgagtcgccgggattacaggcccatgccaccaagcccggctaatttttaaaaaattttttagagatatggtctcactacaacatttatcctttaatgtctggtttcattcgaggttcattcagatggccaaggctgctgtcactggggaccttcctgaagggacagcaaatatcatgaccaataatgcaatctgccataccttggcatgacaatactgtttccagatattgtcactatttcttctccatactattttttttttttgagacagggtcttgttctattgtccaggctgaagtgcagtggtacaatcttggttcattgcagcctcagccttctggactcaagcgatcctcccacctcagcctcctgagtagctgggactataggtgtgcaccacaaaacccggctaatttttctagtgttttgttgttattgttgtttgtagagatggggtttttgccatgttgcccaggctactcttagactcctgtgctcaagccatcctcctgcctcagctacccaaagtgctgggattacagaagtgagccactgcacctggcctatccatagtctttgttgttttttaaccctgtccctttgaggtttatgctattgagctgtactgcttccacttccccttagcaagcctcctagacagatctgttttggggctttttttttctttttttttttttttttttctttgacagagtcttgctctgttgccaccctggaatgcagtggcatgatcttggttcacttcaacctccgcctcccgggttcaagtgattctcctgcctcagccttccaagtagctgggactataggtgcacaccaccatgcccagcttatttttgtatttttagtagagacggggtttcaccatgttggccaggctggtcttgaactcccgacctcgtgatccacctgcctcagcctcccaaagtgcatgctgggattacaggctgagtcaccgcacccggcctttttttttttttttttttcttagagacaaggtcttgcttgattgcccaggctggagtgcagtggtgtaattacggctcactgcaggcttgaactcctgggctcaagcagttctcccatctcagccccacaagtggctgggactactggtgcgcaccaccacaccaggctaactttataaattattattattattattattgtagagactaggtctcacctttttttttttcccccccagaaacaagatcttgctctgttgtccaagctgtagagttgtggtgccatgatagctcactgcagcctcaatctcctgcgctcaagtgatcctccctccttggcctcctgagtagctggaactaaaggcacatgccaccacacctggctaatttttatgttttgtagggatgaagtctcgcatgttgcccaggctggtctcaaacttgaactcccagcctcaaacaatcccctctccccaccaaagcctcccaaagtgctgagatttcaggtgtgagccaacgcgctgggccaggtcctcttctcccttgctctccacggtctacttggaaatctgagagtcggctgcgtgcaatggctcatgcctgcaatcccagcactttgggaggccaaggtgggcagatcacctgaggtcaggagttcgagaccggtctggccaacatggcgaaaccccgtgtctactaaaaatacaaaaattcgccgggcatggtgggtgagcacctgtagtcccagctgcttgggaggctgaggcaggagaattgcttgaacccgggagtcagaggttgccgtgagctgagatcacgccattgtactccagcctgggtgacagagcaagacttggtctcaaaaaaaaaaaaaaaaaagaaaagaaaaaaagaaaagaaaacaaacaaaaaaaagaaatccgagagtcatccttcactcctccctcttccttactcccatagcagacctcttggaatatcctggaagttctaagcctgtcacttctcagtccccacagaagtcacactctcccaagccaccatcatctctggcttgaattactgctgcaggagccttccaagtctggctcctacaattaattcatgatccacccaacaagcacagaacgtcaagtcactcctctcttaaaatcccccatagcttcccgttttcccttaggaagagtctaaaacccttaactttttctagaaggttcctccaggaggtctctacttgctgtctcagcctcggactctctgtgcttcttcagcgtcctgtgctggcactcaattactttaggggtttcatgacacggttctctccctcccactccttttcatccttagggtcttagcttgctccccgaggcctccccacccagtagttctcagtccccgtgtgcccacagcgccctctactgccccttcccaaacacgcagcatgggtgtgtttgcccagcgcctctctgcacacccagacttcaagctgcaagatggcaagcactgcctcctccactgctaagtacctggcaaagcaattgtagtcagtaaattttttttcccattttttttaattttttttttttttttttaggtaaagaaaggcatttattaggtctgggcatggtggctcatacctgtaatcccagcactttgggaggccaaggccagtggatcacttgaggtcaggtgttcaagaccagcctggccaacatggtgaaaccccatctccactaaaaatacaaaaattagctaggggtggtggtgcatggctgtaatcctagcttctctggaggctgaggagggagaatcgcgtgaacccaggaggcagaggctgtagtgagccgagatcgcgccactgcattccagcctgggcgatggagggagactctatctcaaaaaaagaaaaaagaaaagaaaggcatttattagagaaggcatgaaaatacgttgcaagagtgcaacaggcagcactgcagagaaggggctgtctcctctcagtaaatatttttttcaattaaagaatgagtttatcatacaagaagcctggagaaaagaaatggtaaaggttgtgaaagttgtcagagtcaaaatggagtcaccaggcctggcacggtggctcaagcctgtaatccctacactctgggatgccgaggagggcatattgagttcaggagttcgagaccagcctgggcaacatagtaaaagcctgtctctactaaaaatacaattagcctagtgtggtggtgcgtgcctgtaatcccagtttctcaggaggctgaggtgggagaatcacctgagcctgggaggttgaggctgcagtgagctgagatcatactgctgcacattccagcttgggagacagagcaagaccctgtctcaaaaaagaatggaactgaaaaaaataaataaataaaccctgacacgggagttcaagaacaccctggacaacatagcaagaccctgtccccctcccccccaaaagaagatgaagaaaattagttggatgtggtagcacacacctgtagtctcagttcaaggctgcagtgagctatgatctggcccctgcactccagcctgggtgacagagcaagactctgtttataaaaaaaaaattataaaaatttttaaaaaagaaaaccctgacagatagagatggggaaggccatgaagagaagattctcagggttgggtgcctgatcacaaaaactattacaaaagactccaactctgcaaaacccacaaccttgcatacaccaaaaatacttctgcaagaacatcttcccagcaattgcctatccaacttcaaactggcatcatacccgttactgatctttgtagccaagaataattatctcaaaacaattatgtactgctcctcattttttgtttaaaaacctttgacaggccgggagtggtggctaaagcctgtaatcccagcactttgggaggccaaggcgggcagatcactgaggttgggagttcaagaccagcctgaccaacatggagaaaccccgcctctactaaaaatacaaaattagccgggtgtggtggcgcatgcctgtaatcccagctactcgggaggctgaggcaggagaatcgcttgaacgtgggaggcaggggctgcagtgagctgagatcgcgccactgcagactccagcctgggccacaagagcaaaactccgtctcaaaaaacaaaacaaaacaaaacaaaaaaagctttgtctccctttgcctcccggaatatacacagagtttactgtgacaactgcattcctattgcaatgctctgttcctgagtaaatacctttttcttttagaaaagctctgttatttaggttcacatgattaatagatgcaatggttaatgattactagataattaatattaatggatgattaataattgagtaatagatgtcatggataataattatgaattatgattaaattagcttcctgaatgtattagtctacttgggttgctgtaacaaaatacctttgactggataatttataaataatagaaatttggctggatctggtagtgtatgcctgtaatcccagcactttcggaggccaaagcagaaggattgcttgaggctgggagttcgagaccagcctgggcaacatagcaagactccatctctacaaataaaacattttttaacactttggaaggccgaggcaggcagatcacgaggtgagggaccgagaccatcatggccaacatggtgaaaccccgtctctactacaaatacaaaaaaaattagctgggcgtggtggtgcatgcctgtcatcccagctacttgggaggctgaggcaggagaatcgcttaaacccgggagacagaagttgcagtgggccgagattgcgccactgcactccagcctgacgacagagcaagactccactctcaaaaaaaaaaaaaaaaaaaaaaaattaaattagccagccatggtggcatgagcctgtggtcccagctactggggaggctgaggcaggaagatcacctgaacccagaagattgaggctacagtgagccgtgatcataccagcacactctagcctgggtgacaaagtgagaccctgtctcaataaaaataaaaaaaaatcatagagcctggtgtggtggctcacgcttgtaatctcagcactttgggagaccgaggcgggtggaacacttgaggccaggagttcgatatcagcctggcaaacatggtgaaacttcatctctaccaaaaaacaaaatatatatatatatatatacacacacacacacacacaaagtagccaggcgtggtggcatgcacctgtagtcccagctacttggaaggctgaggcatgagaaccctttgaacccaggagggagaggttgcagtgagccgagactgcgccactgtgctccagcctgtgtggcagtgagaccgtcaaaaaaaaaaaaaaaaagcaaaaaataaaaagactaggaatttattgcttacagttctggagactgggaaatccaagatcaaggtgcccgcagatttgggatctaatgaacacccattccctgtaaatggcactttctatgtatcttcacctggcgaaagaaaacgacagctctctggagcccctttctaagggcattattcccattcacgagggcagagccctcatgacaccatcaccttctaacaccatcaccttctaataccatcaccttggttctctggtttcaacaggggaattttggagggtcacaaatattcaggccataccactggcttataaagagaagcagaacagggctggaagcccagacacccacgcccacccctgaattaccattagttctcaactcacctgacatcattccctttcagtgtttcctatgttttttttttttttttaaagacagggtctcgccatatggcccaggctggtcttgaactcctgggctcaagtgatcctcctgtgtcccgaattggtgggttcctggtctcactgacttcaagaatgaaactgcggaccctcgcggtgagtgttacagctcttaaggtggcgcgtctggagtttgttccttctgatgttcggatgtgttcggagttttttccttctggtgggttcgtggtgtcgctggctcagaagtgaagctgcagaccttggtggtgagtgttacagctcttaaggcggcgcatctggagttgtttgttcctcccagtgggctcgtggtctcactggcttcaggagtgaagctacagaccttcgcggtgagtatcacagctcataaaagcagtgtggacccaaagaatgaccagtagcaagatttattgcaaagagcaaaagaacaaagccgccacgtcgtggaaagggaccccagccagctgccactgctagttcgggcagcctgcttttattctcttatctggccccacccatgtcctgctgattggtagagccaagtggtctgttttgacagggcactgattggtgcgtttacaatccctgagctagacacaaaggttctccacgtccccatcagattagttagatacagagtatccacacaaagttctccaacgccccaccagagtagctagatacagagtgttgattggtgcattcacaaaccctgagctagacacagggtgctgattggtgtatttacaaaccttgagctagacacagagtgcccattggtgtatttacaatccctgagctagacataaaggttcacatccccaccagcctcaggagcccaactggcttcacccagtggatcccgcactggggctgcaggtggagctgcctgccagtcccgcgccatgcactcgcactcctcagcccttgggtggtcgatgggactaggcaccgtggagcagggggcggcgctcatccgggaggctcgggccgcacaggagcccaccgagggggtgggaggctcaggcacggcgggccgcaggtcccgagccctgccccgcgggaaggcagctaaggcccggcgagaaatcgagcacagcgccggtgggctggcactgctgggggacccagtacaccctccgcagccgctggcccaggcgctaagcccctcattgcccggggccggcagggcctgccggctgctccaagtgcggggcccgccaagcccacgcccacccggaactccagctggcccgcaagcgccgcgcgcagcccgggttcccgctctcgcctcgccctccacacttccctgcaagctgagggagccggctcccgccttggccagcccagaaaggggctcccacagtgcggcggtgggctgaagggctcctcaagtgccgccagagtgggagcccaggcagaggaggcgcggagagcgagcgagggctgtgagaactgccagcacgctgttacctctcactcctgccttggcctccctaagtgctgtgattacaggcatgagccaccacacctggccccttctatgcctctagacctcatgaaatgcccttccgtgctatgcctgttgaaagaaagccagtttctcgcttgagagagtgtgtcccttcctctgccctccctaactcctgttgtctcgcctctcccacagtcctcctgggtgcatccccgagtcctttccttttacccaccctgagactcccacagctctctcagtggagtcctccgcagaagtctggagcctcaccaggatgttgcctgtccccgagctcatttctgagtagaaggatttgaaaccctcagaaatgacaccctgaaaaaagaaacagaatgctgcacccgtgagacacatcccaggcctgggcttgttaggtctgtctgccaaaccaggctgtgctttgggtgtgaggtggacagctttgcaaagcccactcccccgtgtcaaatcgtagttcctccctctgggctaaaaagggagtggtctgaaattaaggcactggaggctgtgtttgtctgcgcaggctgccatagcaaagtgccacagactgggtggcttaaacaacagaaatttattttcttacaatgctgaaggcttggaagtctaagatcaaggtgttggcaggtttgatttcttctgaggcctctctccctggcttgcagtccgccgcctactcactgtgtcctcacatgttctgttatctatgcatacacatcccttctgtctctctgtgtctaaatttcctcttcttggccaggcatggtggctcaggcctgtaatcccagcattttgggaggcagcatttgggaggaccacttgaggccaggagttcaagaccagcctgggcaacatagtgagaccctgtctatactaaaaatacaaaaattagccagttgtggtggcacatgcctgtagtcccagctactcaggaggccgaggcacgagaattgcttgaacacaggaggtggaggtcacagtgagccgagattgcgccactgcactccagcctgggcgacagagtgagactctgactcaaaattaattaattaattaaagacatcagtcagtttggaattggacccagcctcatgaccctattttaactttatcacgtctttaacagccctatttctaaatacagtcacattctgcggtactgggggttagggcttccacatatgaatttgggggagggggaacataagtcagccataacagagacagtccttggttttaggatattaccaatccttcagggttctctgaataagagcaataaccagtggaagaataagtaaataagtgtcatgtctgaaagctagagacaggatacaattaatttttaaatgaataggtacaggctgggtgtggtggctcacacctgtaagcctagcagtttgggaggccgaggccaggaggatcacttgagctcaggagtttgataccagcctgggcaacacagtgagaccttgtctctataaagaaaaaaatttttttgaccaggcacagtggctcctgcctgtaatcctagcactttgtgaggccaaggcaggcggatcacctggggtcaggagttcgagaccagcctggccaacatggcaaaaccccgtctctactaaaaatacaaaaattagccaggcgtggtggcacaggcctgtaatcccagctactcaggaggctgaggcaagagaatcacttgaaccagggaggcagaggttgcagtgagccaaagttgcagtgagccgaggtcgcgccattgcactccagcctgggcaacagaatgagactctatctcaaaaaaattttttttaattaaaaaaaaaagaatacatatgaataattgtatgtcagctagctttttctttctttctttcagatggagtttcactcttgttgcccaggctggagtgcaatggcgtaacctcagctcactgcaacctctgcctcctgggttcaagtgattctcctgcctcagcctccggagtagctgggattaaaggcacccaccaccacacccagctaattttttgtatttttagtagagacagagtttccccatgttggccaggctggtctcgaactcctgacctcaggtgatccacctgcttcggtctcctaaagtgctgggattacaggcgcgagccaccacacccaaccaactagctttttaactcaatgaaagagagcagaggaggcctggggtccacacatctgggtccttcgcctggttgtgccactgttaaaggagagacagtacgatttaaagagactggaagataaataaaaaggaaggttccaaattgcaggaattagtatctccaaacagcctcaatccttttggaactgggaagcaggcctgaaggactgaatgataaaattagtagtaactcagtataaagcagaatatttctttccaactctgaggactgtggtgcacatttgatggaaagatgggaagaaaatcaaatgcactaaacttgttccaggggcaagcacagcaaagtatctgccaagaaggggggatcccaaagagaaaatttatcagcctcagttttgcgtggggttagccttgttcacaaggaatcccaggtatcctgccaatagcatgggatacattgttatgggacagataatgctaagtacatagtatcagcatgaagatctagagaatatcttcatacattacatggcaggtttgattgtgaaatttttattttgtttcgttttattttattttattactttgagacagggtctcactctgtcgcccaggctggtgtgcagtggcgcaatcacagctcattgcattctccacctcccaagttcaagtgattcgcctgcctcagcctcctgagcagctgggacaacagtcgtgcgccaccacgcctggctaattttttgtattttttgtaaagacagtgtttcatcatgttacccaggctgctctcaaactcctgggctcaaacaatccacccaccttggtctcctaaagtgctgggattactggtgtgagccatcacaccctgctgattatgaagtttaaaaagttaagtcctggccgggcgcagtggctcatgcctgtaatcctagcactttgggaggccaaggcaggtggatcacttgaggtcaggagtttgagaccagcctgaccaacatggtgaaacgccatctctactaaaaacacacaaaaaattagccaggagtggtggtgtgcacctgtagtcccagctactcgggaggctgaggcaggagaatcgcttgaatccaggaggtggaggtcgcagcgagccaagattgcgccactgtactccagcctgggtgatagagcaagattccgtctcaaaaaaaaaaaaaaaaaaaaaaaaaaaaagttaagccctctgtatcacgtgagtttgtatgcttgggtagaggtacagctctccattgttcctgggcacacagtaagactaaatgaagggagttttgactgggaagcgtgtgttttccattgacatgttcccaggcatgtgtggacatggctggcgtgggcctcaggagtaaggcaaggggaattcaggatttcctctctccatgacacatgacagcttaggtcacgttcaagttcctttgttatatgctctcatacaattgcattcctctccttctgtcttagtccattcaggctccttatagcaaaatgccataaactggatggcttataaacaacaaatattggctgggtactgtagctcatgcctctaattccaacactttgggaggccgaggtgggtggatcacaaggtcaggagtttgagaccagcttgacaaacatggtgaaaccctgcctctactgaaaatacaaaaaattagctgggcatggtggcgcatgcttgtaatcccagctactcaggaggctgacacaggagaatcgcttgaacccaggagctggaggttgcagggagctgagatcacacccttgcactccagcctgggcaacaagagcaaaactccgtctcaaaaaaacaaaagaaagaaaaggaaggaaggaaggaaaaatatttattttccacattttctagaagctgtgaagtccaagatcatggcacagacagattcggtgtctatcgagggcccatttcctagatggtgccctctcactgtgtcctcacatagtagaagagacaaacaagctctcttgggcttattttatataagcactaatcccagcctgagcgctccaccctcatcactaatcacctccccaaaggcctcagcttctttttttattattattttttaagcgatgaggtctcactcgttcacccaggctggagtgcagtggcaccatcacagctcactacagccttgacctcccaggctcaagtgatcctctcacctcagccacccaagtagcttggactacaggcatgcaccaccatgcccagctgatttttttattttcttgtggagacagggtctctctaggttacccaggctggtctcaaactcctgggctcaagtgatcctcccaccttggcctcccaaagtgctgggtttacaggcataagccacggtgctcaaccatattaacattcttgcttgtgtgatggatgctatcactgacgaaaccctcccaggtctctggtagtgccatgaatttctaatattttcagactcaaagaaatgcccagagttcaaagaagaacaccagaacctcatttgaactcacctgcctgtccctagtgaggggcagtcatctcaaatacaactgacaatcaagttcaaatctgacacttttatcatagatttatgagctagctggtcccaggtgtgcatggcccacttctccttgtccatgatcaagacaatttgcttggtatttgctttttatttttattttttgagatagagtcttggtctgtcgcccaggctggagtgcagtggtgcggtctaggctcactgcaacaaaacctccacctcccaggttaaagcaattctctgcctcagcttcccaagttgcttggattacaggtgcctaccaccatgcctggctcattttttctatttttagtagagacagggtttcaccatcttggccaggctggtcctgaactcctgacctcatgatccacctacctcagcctcccaaagtgctgggattatagccgtgagccaccgcacccggcctgctttttatttttctaccaaagacttctgtcctcggttttcttctccctccagcccttctgacccagctggccacagaccatgatagataaagtgcagaagtcctcgctgccaagctgcttctcccttgtgactatgtccatgctaagtatttctgtcttagaatagagctacaagaattatagaggctgaagactctcattaacaaacagccctttgcatttgacaaggtgttacagaagaagaaagaagtgaattttttttttttttttgagacagagtctggccctgtcacccaggctggagtgcagtggcacaatctcggctcactgtgacctccacctcccaggctcaagccatcctcccacctcagcctcccgagtagctgggactacaggcacatgccaccatcacacccagctaatttttgtattttttgtagagatggggttttgccatgtctgatctgcccaggctggtcttgaactcctggactcaagcaatgcacctgcctaggcctcccaaagtgctaggattacaggtgtgagtcactgcgcctggccagaagtgagtattcttgatagcctcaggaaatgaaagatatattactgggcccatactcagctcgtggcaaagccacctccatcaactgcccccattccagctggctggctgtgaaattgcctttgcaaaaattgtgacagtgaaagaaatatcacgtaactgactccatcttgcttctaagctcacagctgtctttgctcattcctgcacataggccaagccaactatatgaggactttagtttatagttaactttaaaacaaagcaagccaggcatggtggctcatgcctataatcccagcactttgggaggccgaggtaggtggatcacttgaggtcaggagttcgagaccagcctggccagcatggtgaaaccccgtctctactaaaaaaatacaacaatttgccaggcgtggtggcacacgcctgtaatcccagctactttggaggctgaggcaagagaatcacttgaacccaggagacagaggttgcagtgagccaagatcacaccactgcactccagcctgggcaacacagcaagactccatctcaaaaaaataaaaataaaaaataaaacgaataaaataaagctgataacagtcccttcctgaaactaacccccttcttgctcagggactgactgacactgcctttgtataactaatgaaagacctcaaggttagaattgtggtaggggcctgaattctgctaagatgaaggcatagttaaactctaacagccattgtttcttctaagatgtggatatagttaaactctaacaagtcattgttttataacttgcctttttttgtaactgcttattactcagaaatcatatagccaatggtcacaagatttataacttccccaattcccccatggacaacatcactattgtacagtcaaagactggtatttgagacattttccagaccttgcattccgtatggaccaactggcgccacctggaccagcaactgacacccaggagctgacttagcacagaagacagtttcgatcccctatgatttcattcctgacccaaccactcagcattcctcattccctagtcccctgcttgccaaactatccttgaaaaaccctagcctccaaattcttggggatgtggatttgagaaatatctcctgttcttctcacttgactggccctgtgattattaaactttctctgctgtaactcctgctgttcttggtgtcttggcttttctgggcagcaggcaagaagaaccagttgggtgattacagcaaggatggatttcttgctcagttatgagatccttctttgtagcaggccattatccccattatcagccatccttgactgcttttgtccagaagcacacctcgcaacttgtctgaagtgcaacctacacccaccccagtaggaattgccctgggacatgactgagctcttcaggcccacggcagtgtcaactgtgagtcatgtaaaggagaaatgtcaaagaaaaaaaatgagacaaaaaatagagccaaggaagactctggggatcttccaggttgtacaaaccaaaataggtttttgtttgtttgtttgtttttgtttgtttatttgtttttttgagacagagtcttgctctgtcgcccaggcaggagtgcagtggcacaatctcggctcactgccagctctgcctcccgggttcacaccattctcctgcctcagcctctggagtagctgggactacaggcacccgccaccacgcctggctaattttttttttgtatttttagtagagacagggtttcaccgtgttagccaggatggtctcgatctcctgacctcgtgatccgcccgtcttggcctcccaaagtgctgggattacaggcttgagccactgctcctggcccaaaataggtttgggggaaggaaagagagtgaaggaattacaaacagatccatcaacaccctccttatcctcaaagtttactgtttttgttttattttgttttgttttgagacagggtcttattctgtcacccaggccagagtgcagtggcgtgatcatggctcactacaacctcaacctcccgggctcaagtgattctcccacctcagcctcccaagtagctgggactacagggcatccaccatcatgcccagctgattttttaaaatttttttgtagagatggggtctcacaatgttgctcaggctggtctcaaacacttgggctcaagcaatcctcctgtcttggcctcccagagtgccagggttacaggcatgagacactatccctggcttactgtgttttaaagaagccaaagaagtacttcagtgccctgacatgatctttgctgacagtcagatctccaggcacgttcaaaggcgatttgtcatataatgatacatccatttcaatccactggtccaggagctgcctttggggcattaggacagctgggcctcacaagccacttctgttctagcccactcctcagggcagttgacagaacacaatgagaatgttccagcaaagaagtgtatacctaaaggtgagtcacaggtactcaaaagaaagcaatactggtatgcacaaaatgaaaagcttcccggtagatattcccataccagcttcttttttgccccatcctctggcttctaacggcctcttgcatctttccttggccaattcttttctctctccatgtttattgtctcacctctcttcctctcaaccccagtccttattctcatcttctgcttcagattcctgtcttctttctttctttttttttttttttttttgagatggagtttcgcttttgttggccaggttggagtgcagtgctgcaatgttggctcaccgcaacctctgcctcccaggttcaagcgattctcctgcctcagtctcccaagtagctgggattacaggcatgtgccaccacgcccagctaattttgtatttttagtagagatggggtttctccatgttggccaggctggtctcaaactcccgacctcaggtggtctgcccgcctcagcctccgaaagtgctgggattacaggcttgagccactgcgcccggccaattcctgtctgttttcaagaaaaaggatccattcccttcttgatcgtcatgtccatcttgactcttgcatgatcaacaccctctgtcctaccctgcaatcaccctacctcttcctcctcacatttattgtccctcagtgacaaatttctcccctgttctttgcttttcaaaagcaagaactaagacaaattttgaggccaggggcagtggctcatgcttgtaattccagcactttgcgaggctgctgtgagagaatcgcttgaggctgagttcaagatcagcctgagcaacagagtgagaccccgtctccacaacaacaacaaaaaagacagaacagccaggcgtgatggcatgcacctgtggtcccagctattcgggaagctaagatgggaggatcacttgagcctggggaggttggggctgcagtgagccatgatcatgcaactgagctctagcctgggcgctctagcctgcctccaaaaaaaaaaaaaaaaattaaacttcgagattatggagagcttcctgattgttaaatatatcctcagacggggatggtggtgcactccaactctatgccgatagaagctcctgtacttacaacccttccagacctcatcctatgcacctcttcatctgttcccttgtaccctttatattaaactggtaaacataagtaaagtgtcttcctgagttctgtgagctgttctagaaaattatcgaacattatgagggaggcatgcaaaccccccgatttatagctggttggtcaaccaaaagagtcaaactctgtaaaatatttgaagagatttattctgagccaaatacgagtgaccatgacccataacacaaccccaagagatcctgggaacacatgcccaaggtcattggggcacagcttgcttttatacattttagggaaacatgagacatcaaccaacacgtgtaagatatacactggtttggtctggaaaggtgggacaactgaaagcaaggcagtggggtggaagggaggggaggtggggattccaggtcatggatggattcaaagattttctgattggcagttggttgaaagagtttaactaaagacctggagtcaatagaaaggagtatctgagttaggataagggaccaagttctttttttttttttttttttttttttgagacagggtctcactctgttgcccacgctggagtggagtggcccaatcttggctcactgcaacctccgcttcctgggtccaagtgattctcatgcctcagcctccctgtaactgggattacaggtgcgtgccactgcaagaaattttactatctattctctctgaagcctgctacctggaggcttcatctccataagaagaaccttggtctcggctgggtgcagtggcttatgcctgttaatcccagcactttgggaggctgaagcgggtggatcacctgaggtcaagagttggagactagcctggtcaacatggtgaaaccccgtctgtactaaaaatataaaaatcagcagctgggagtggtggctgcctgtagtcccagctactcaggaggctaaggcaggagaattgcttgaacctgggaggtggaggttgcagtgagccaaaatcatgccactgcactccagcctgggcacagagtgagactctgtctcaaaaaaaaaaaaaagaattttatttttggtttacattggtcagaagtatgggagtcctgggacttgcaactggcatctgaagttggtgggtggggcagttttgagcccttcagctgtggaatctgccctaactccaggtagtatcagaattgaactgaattgttgaatatccagttggtggccagagaatcagagaactggctgttggtgttggaaaacatcccaggagtccttgaagtaggagaacagagaaccaaaaagagcatgagaaccagagacagagtaaaaaggattcaaagatgagctgttctggagtttacccccttacacactcatcacctatggacaacccacctttcaatagacttggatccttataggctccctgaatggaggctggatgaattggacaccttgtgtggataaagcatgaaagaacttccacgtaaaacaagatggaaccaaacagacacaattggaaacatccctatgggcaccaatggacctacctgcactgtcccttaggtatggagtcagcaaattccactgcagtatcccaagagtgaacagggtttagcaggagatcctttcacagagaagaatccttctaggaagtgcccactgaaacatccagttaatctaagatttaggcactgagaatggagcacagaaatttttttttttttttttttgagacaggacctcactctgaagcccatactggagtgtagtggtacttacatggctcactgcagcctcaacctcctgggctcaagcaatcctcccatctcagcctcctgagtagctgagaccacagatatgtaccaccacacccaataatttgtctgatttttagtagggacagaatctcaccatgttacccaggctggtctcaaacccctgggcccaagcgatcctcctgcctcagcctcccaaagtgctggccttataggcgtgagtcactgtgcctggctgcaaattcttatatcaagacttcatccttctttctgtttataaatatctggaagttccatggagctataccagatgtcaggaagggcctcattcagagtctcatctcttgtttttcatggtaattaaaatcttaaggttggccgggcaaggtggctcacacctgtaatcccagcactttgggaggcttaggcaggcagatcacaaggtcaggggatcgagaccatcctggctaacagggtgaaaccccatctctactaaaaatataaaaaattagccaggcgtggtggcgggcacctgtagtcctagctactcgggaggctgaggcaggagattggcatgaacctgggaggcggagcttgctgtgagccgagatcgtgccactgcactccagcctgggcaacagaggtcaggctggctcaaaaaaaaaaaaattagccaggcgtggtggcgggcacttgtaatcccagtttcttgggaggctgaggcaggagaattgcttgaacccaggaggcagaggttgcagtgagccaagatgatgccatttcactccagcctgggtgagagacagagactctgtctcaaaaaaaaaaaaaaaaaaaattaaagagaatagcttcctgttggtccccagcccagagccaagcagctctgtgagtgacattaagctggatgaagatgacatagcagagcaaatggcaatgctatcttctaaccagaattgtcagtaatttacctccagccctgccaaagcccaggaggaggcttaattgaggaagggatatttgcaggccacaaatcaaaatgacataaataattatgaaaaacaggctgggcacagtggctcacgcctataatcccagaactttgggaggctgaggtggagagatcacttgaggtcaggagttcaagaccagcctggccaacatgtattttttgtagagatgaggtctcactatgttgcccaggttgatcgccaaatactggcctcaagcaatccacccacctcccacagcattgagattgtaggtgagagcccctgccccggcctcaaatttccccttttcataaggacacctgtcatattggagtagggacccaccttactccagtatcacctcatcttaactacacctgcaacaaccctatttccaaatacagtcagaggcactgggagttggcacttcaacatgtgaatctggggggtggggtacccacaccaggctcatagacaaataggtttcaaaatatgtagataattttcaattaatctgaagaccgtcaaagagaaaaattctaacagctttcagaaactaaacaacaccagacttgtcagcagcaacaacagatgcaagaagacaatggggtagtattttgttcaaagaataaaaggaaaacacttggaacttagagaattttatgtctagcagaactgtcatttaaatgtgagggtacataaagatattttcagatataaaaaagtgtcaaaaatttatcccgggccagacgtagtggctcaatgcctgtaattccagcactttggaaagccaaggtgggcggatcatgaggtcaggagttcgtcaccagcctggccagcacagtgaaaccctgtctctaccaaaaatacaaaaaaaaaaaaaaaaaattagccgggtgtgatggcaggtgcctgcagtcccagctacttgggaggctgagtcaggagcatcacttgtacacgggaggtggaggttacagtgagccaagttcccaccactacactccagcctgagcaacacagtgagactctatctcaaaaaaaaaaaaaaagtttaccccacaaaaaccttcaaaaataatcctggaggaagtattacagcgagaagagaaacaacttatgagacacagcaaataatagtgactacatttctatgataaataaataatgcccccaaaaggcatatttatacaaatccaaaatcaaaagtctaaaaaatatcaatatggcagtttcagggcaaaaggaagcagaggggagaatttatggggtagaataaacacaaattagtctgagcatgttaggaataactactataactttttaaaatttttttaaattaaataattttcaaatcagaagtagaaaataatcaatgtattcatggaagcaaggaaaggagaaaaaaagagagtatggtaaataaaagactgaaaagagtccaaaaaaaaaagtcttttgttgttgttgctgtagagatgggatcttgatctgttgcccaggctggagtgcagtggctcagtcatagctcactgcaaacttgaccttctgggttcaagcaatcctcttacctcagcttcccaaggtgctgggattacaggcatgggccactgcacctagccaggaaaatgcatttaaacctgggctttcaagaatttccttagggctggccacggtggctcacacctataatcccaacattttgggaggccaaagtgggaagatcaggagttccagatcagcctggccaacatggtgaaaccttgtctctactaaaaatacaaaaattagctaggcgtggtggcaggctcctataatcccagctacttgggaggccgaggcaggagaatcgcttgaacccaggagggagatctcggttgcagtgagctgagattgtgccactgcactctagcctgggcaagatagcgagactccatctcaaaaaaaaaaattcctcatataaaatcccaaggaacataagttgatattttaaaaaatcactaacaggaaataaactacataagcagaagcaataagcctcagaatcagactcacaaatggcacagccactggaagtatgctgtacagaatataaaataaatacagtaaatctttaaagaaattaatggcagagctttaaaaatactgaaggaaaagctgattattaaaactgtcaaggaagatttgaagaggaaaaactaaaaattatataagtgaaaactttaaaacccagtgaacaaatgaaatcgattacagcacagctaaaaagaaaagaaactaggcacatattggaagaaattatacagggtgtggccaggcacagtggttcacacctgtaatcccagcactttgagagcctcaggcaggaggatgacttgagcccaggagttcgaggccagcctgggcaacatagcaagacctcgtctctactaaaaatttaaaaaattagccaggcgtggtggcgtgtacctgtggtctcagctactggagaggctgaggtgggaggatcgcttgagcctaggaggcagaggttgcagtgagccgagatcgcaccactgcactccagcctgggcaacagattgagaccctgtctcaaagtcaaaaaaaaaaaagaagaagaaaagagagagattgttagagatagtattagggaacctggcacttgtaaggagaaaagtaaagttagttccccacctctctccataatacaaaggtcaaataaatgggctagaaacctaaataaggaaggtaaaaccagaaggctaggactgtatgttaatttcctagggctgccataaagtaccacaaactgggtggcttaacccaacagaaatctattgtctccccattcctggaagccagcagtccaaactcaaggtgtcagcaaggccatgcccgctctgaaccctgcaggggaatccttcctcacctggtcttagcttctgatgatttattggcagcctttggagttgcttcgcttgtagctgcataactctaatctctgcctttgttgtcatatggcattccgtgtgtgtgtgtgtgtgtgtgtgtgtgtgtgtgtgtgtgtgtgtgtgtgtcctcacatggctatcttctttttatttatttatttatagagacggggtctcactgtgttgcccaggccgatcttgaactcctgggctcaagtgattctcccaccttggcctcccagagtgctgggattataggtgtgagccacggcgcccaaccaggctgtcttcttataaggacaacagtgatacggcattagcagcccaccctactctagtatgacctcatcttaactaattacatctgcaacgaccttgttttaaatacagtcacattctgaggtactgggagtaggaattcaacatatccttttggaagaacacaattcaacccataacagctgctagaaaaatgtagaatattgttatggctttggagtgagcaaagattcttcaacccagaaagcacatatggtgaaaatgtgacgggtttgactacatgaaatttaaagatttcttccaaacaaggacatcagaacatcattgaaaaaattaacacagctgggcgaggtggctcatgcctgtaatcctagcactttgggaggccaaggagggcggattacttgaggtcagaaatggcgcatgcctgtaatttcagcaccagcctggtcatcatggcgaaactcagtctatactgaaaatacaaaaattagctgggtgggcatagtagcttatgcctgtaatcccagctactagggaggctgaggcaggagaatcacttgaacccaggaggtggaggttgcagtgagccaagattgtgccactgcactccagcctgggcgacagagcgagactccatcttaaaaaaagattaaaaaataaaaagttgacttgatattagtcaagggatacaaaatatcagttatgcaagatgaataagttctagagatctaatgtacaatgacacgactatcgttaataagattttattgtatacttgaaatttgttataagggtaggtcttaagtgttctcaccacaaaaaaaaaaaaaagctccccaactcattgaatagggctagcattccgccaatgtcaaaactaggcaagaataacaccagaaaattccatttatgaaaacaaatgcaggccaggcacagtggctcatgcctgtaatcccagcaccttgggaggccaaggcaggtggattccttgaggccaggatttggagaccactccggccaacatggcaaaaccccatgtctactaaaaatgtaacaattagctgggcacagtggcatgcgcctatagtctcagctctggaggctgaggtgggagaatcgcttgaacccaggaggtgggtgagctgagatatcaccactgcactatagcctggatgacacagcaaggctgtctcaaaaaaaaaaaaaaaagaaaagaaaagaaaagaaatgcaaaacaaccctaaataaagtattattaaatcaaatccagcaatggtgaaagcaagaaagaggagataatcaacattaatggattaaaggcagaaaaaccatctgattgcataaataaatgcataaaaagcatttgataaaatgtaacacctgcatttaaaaaagaaagaaagaaagaaagaaagaaaaatctctagcaagttaggaatagaacctgataaaggacttctactagaaatctactgaaagcatcatatttaatgatgaaaccttaggatcattcccttaaatgtctaggacaagacaagaattgtccattaataccactgccattcaacattgtattggaactcctagccaaagaggagaggattaagaaaaaaagcatagacatcagattttttaaagctgtaatttttttcttttttctggacaacaggatcatctagctagaaaatcgaagagaattatctgtcaagctattctagaacaagcaagagtgagttcaacaaggcagccaaatccaagataattttttttctttttttttttgagatggagtctcactctgtcaccaggctggagtgcagtggcgcaatctcggctcactgcaacctctgccacccggttcaagcgattcccctgcctcagcctcccgagcagctgggattacaggtgactgccaccatgccctgactaaatttgtatttttagtagagacagggtttcaccatgttggccaggctggtcttgaactcctgaccttgtgatccacccgccttggcctcccaaagtgctgggattacaggcgtgagccaccgcaccgggcccagagacaacctgttctgcagcccatttgcttcttccagagtctccctctgtcgtccgggctagagtacactggctcgatctcggctcactgcaacctccgcctcccaggttcaagcgattctcctgcctcagcctcctgagtagctgagattacaggcacctgccaccacgcctggctaatttttgtatttttagtagagatgaggtttcaccatgttgtccaggctggtctcaaactcctgacctcaggtgatttgcctgcctcagcctcccaaagtgctgcgattacaggtgtgtgagccaccgcccccaccctctatttgcttctttgagatgaatcaccccataaatgattggtaaacagagtaatgatgtcagcataacacaagcatgttggttaacatgcaattttctccaggaagttaacattttgaagcaatcagggccaagctttctcacagttaaaggggaagccttagtactaaaagaagatcttcagaggaaaaagctgcaaatctacagaagtgtcttcctttggatccacggtggctggtttagtgacttcaaagaccaccatatttgtcacagtgttatgcctatggcaaatccatgaatgcagatgaagaaattgcaaatatatttctcccatattaaaataacagattaatgaaaaagatcacaccttggatcacatttcgagttttgatgaaaatgatccccatcaatagttaatatctccaaccagcatccccaaagaggaagcataagccccaccttcaaggctgcaaagtgctgctgaaagcaaatgctcatggaaatttacctattctagtgtttctattagcatcattattggttttgtagcactctgaatataaagttgtatacaagaggccgggcatggtgcctcacacctgtaatcccagcactttgagaggccaaggcgggcggatcacgaggtcaggagatcgagactatcctggccaacatggtgaaaccctgtctctactaaaaatacaaaaattagctgggcatggtggcgcccacctgtaattccaactactcggaaggctgaagcaggagaatcacttgaaccagggagtcggaggttgtggtatgccaagaccgtgccactgcactccagcctggcaacagagtgagactccatctcaaaaaaaaaaaaagttgtatacaggtttttatttttacttttttttttttgagtcagggtctcgctctgtctctcaggctggagtgcagtcagtgccacaatcacagctcacagtagcctcgacctcctgggctcaggtaatacccctatacctcagtctcccgagtagctgggaacacaggtgcacaccaccacacccgcctaattttttatttttttgtagagacggagtctccctatgttgcccaggctagtctgaaactcctggactccagtaattctccctcctcggcctctgaaagtgctgggattacaggcatgagccaccgtgcccagctagttgcatatattttgagcaatctgtctctaactctattttttccatgaagtcttgttaattttagtgcaccgttttgaagaactgaaggttttttaagaatgcatatagcaggttatagcagaaacacttatactcagaatgaagctggggctctctcttccaacaagcatttttgatatgctccgagtgtccctgctaggtagccaggagaccaggtaacccacttccctctgacaatggaacaattccccaaggaccctgaggggcagttctctggagtttgggcactagagtccctcttatttcctcttcttctctcctccctctagaccccataccactcaggagaggccaagtaaaaagacccagaattttgcctcttacaagcttagagatcttgaagaagtcactgaacctctgcgggacctactttcctcattctttaaatagaaaggcagtgggttttttgtttgtttgttttttgttgtttttttttttgttgttgttgtttttgttaatcgtggcgatggttatttatttatttatttattttgagacggagtcttgccctgtcgtccaggctggagtgctgtggcgtgatcttggctcactgcaacctccacctcccaggttcaagcgattctcctgcctcagcctcccgagtagctgggatagattacaggcgcacaccaccacgcccggctaatttttttttttttttttaaatagtagagacgggggtttcaccatgctggccaggctggtcacgaactcctggcctcgtgatccgcccgccttggcctcccatagcgctgagattacaggcgtgagccaccgcgcccggcctggttgttaatttttaaaactgcctttcatttttgctttgccatttatagctctgtagccttgcacaaatgacttcacttctctatgagtcatctgtaaaatggggctctttgtgaagacttaacgataccacgtgtacaaagcactgaatacaacatgcacattaagctccccgaaattgaaactcctataaaataggaatcggggattctcaagagcaggagttctgacttcagcagaggaacccagagctggtggggaaagcagacgtggctgtgacatccccagggacactaaacacatcctcccagccccatcttccccgcagagtcccgccaccggcccgacccctaacttgctccaaccacccgccgacgcccgcagcccgctgtttgggggccgccccctgcagcgccaggtccccgcgcggactacagttcccagcgtacatctcggtcggggggtccgaggggccgtcctgcctcagggataaggtccaggctgcgttcgcggctccgggcagtcacagtcatgcacgcagctcctatttttcgcgttgctaatcgcgtccgttgcagtccaacccatcctgggccgcggcccccacagggtctgtgaggagcgcttccccccgccccgggcgcccgctacgccgcgtccgaaggaggggccgaggccgggctcatctccccgggaggactccttcggcttcgtggggtgtcatgtccattgcggcccgaggctggccgcggggctctgctggagggcgctgagagccgggccccgaggccgcacggccggagactacaactcccaggaggcaccgcggcggcggcgcccacacgtcactcgggccccgccggtggcccggggaagcagcacgggcggggggcaggggctggggccgaccgggaggccggtgccaaggatgggggccgcccggctgccccgcgcgtgaggaggccgaggggcgcgccaccccggcccggggcggccgccccaggggccccgccacccccgcccggcccggcagtcgtggcccgggatgcggagccgggggccgccggtggagctgcgcggggtgagcggcgcggggaacggggactgcctgccgccctcgccctcgtcccccaccggcggaccccggcgggcattcgagagccgcgcggccaggccctcttagccctctgccgtttggggggcacgggtgaacctgccgccccactcccaccccgccccgccccgcccgtacagccaaatcggaagggacgagcctgccctttgaaagggttttttttcttgctcctgcggagggcgccccagccatggccctcaggagctccctagaccccgcagggactgccctccatcccggccgccggggcccgccctctgcatcccgcgggcagcctgtgtgaagcggcctcccgcagcccccggcccctcccccatggaggaggaggagggggcggtggccaaggagtggggcacgacccccgcggggcccgtctggaccgcggtgttcgactacgaggcggcgggcgacgaggagctgaccctgcggaggggcgatcgcgtccaggtgctttcccaagactgtgcggtgtccggcgacgagggctggtggaccgggcagctccccagcggccgcgtgggcgtcttccccagcaactacgtggcccccggcgcccccgctgcacccgcgggcctccagctgccccaggagatccccttccacgagctgcagctagaggagatcatcggtgtggggggctttggcaaggtctatcgggccctgtggcgtggcgaggaggtggcagtcaaggccgcccggctggaccctgagaaggacccggcagtgacagcggagcaggtgtgccaggaagcccggctctttggagccctgcagcaccccaacataattgcccttaggggcgcctgcctcaaccccccacacctctgcctagtgatggagtatgcccggggtggtgcactgagcagggtgctggcaggtcgccgggtgccacctcacgtgctggtcaactgggctgtgcaggtggcccggggcatgaactacctacacaatgatgcccctgtgcccatcatccaccgggacctcaagtccatcaacagtaagtggtgtcctctccccaaaattccttccacagaacctctcaaggccaggcctaggtggtgggaaacagggtgagggacaccagatgacactgtgcctggagtgagaaggggcagcagtatgataccttcagggtgaaggtgaggtaggccttgcctgccttaagggagaaaaaggaggctcagaaaggttgaaggacttacctgcctcccaggctgcagagtcacaatcgctcagtaaacatgtatccatgaacacctgcgttccctgcatgaacaggacagatgcagtgcctgccttcaaggtgcttgccatccagccatgctgccagagtccaccaggcagagacaaaaagagcctaccccgtctggagtcagtgtctctcaaccccagcactattggcacttgaggccagatcattgttgtaggggctgtcctgtaaattgtgagttgcttagcggcatctttagcctcttcccactagatgtcattagcattccctgccccctctccccagctatgacaaccaaaagtgtctccaggcattgcaaatgtcccctggggggcagaatcacccccagttgagaaccatttcctggagtcttcataggccgagctggccaaggcaaactggaaaagatgagggaggaattaaattgatgtggcttatataaaagcttccaggctgcctgataggttctccaaagttgattggttggttgaataaataatggagccaggtagaagggaacattctgcaagactcatttctagatggaagagcttcatgtggtgtcaacaagtattaattgagcacctattaagcaggagcccagctgggagtaagacagccatggtttctgccctgacagtactcacaggctagcaatttcattcattcattccacagatatttccagagtgctgtgtgccagaccctgtcccagggatacagcaagaaaaaaaaaatcttacattcctggctctcccattcgtgctgtgccccatctcactccctttcatttcttcattcatttgttcattcttccatttggtatttaccaggccagatcatgtgctaagcaaaggcatcagcagtggagaaggccagcatgtccccggccctcacgtcactcacagttaagccccaaaatgtgaaggtgccccctttgctctcaacacccacatctcatctattcctgatttctgtcacttctacatcttgaaatttattttaatccatcccactatttttaggaatatattgctattccccacccatagcaattgtaagcccctagaatagagggactgcatcttccttgcctcccaagcctgacatttgtatatcaacagagagcttggctgggcgcggtggctcacgcctgtaatcccagcactttgggaggccgacgtgggtgcatcacccgaggtcaggagttcgagaccagcctgaccaatatggtgaaaccccttctctactaaaaatacaaaaattagctgggcatggtggcatgcatctgtaatcccagctactcaggctgaggcagaagaatcgcttgaaaccaggaggtggaggttgcagtgagccgagattgcaccactgcactccagcctgggtgacagagcaagattccatcgcaaaaaaaaaaagctaacatgtgaccacgatgtgccagagctggtgctgtgtctggggaactgatgcttatgccccagcacctctgaaatgttgggtaaatggaggcagggccacccagcatgctcctgttgaaggctgggactcctcagcccttcctcacctctgctgattgacagcacgccccacacccccaggttttttgtagccagtgctatctggtcaaagggtcagtgggcctcttatggccagggcttcctcccggggtgatgggtctgctctgtgccagaaacagaggacacagcgcctccacagcactgcttccccactcatcctaccctaaggagcgcctcatctgccatcattcattcattggttcattccaccagtaattcttaagtgcctactcttactaggcactgcctcagctctgggattacagaagtgaacaaggcaagatttctccctcccccagctatggaatttatattccggtgaacaggaataaatgatggatagatggataccaaaatttcagagagtatcaggggctctcagtggactaaggcaaaggctggagcagagggttctctttatttagatcgggtggtcagggaaggcaacatttgagcagagacctgaacaaaggggacccagctttacaaagatctggggaaggggaacagtggggcacatgccctgaggtgggagtgagtgtgtctcactggagaacagcaagaccagaacagcaggcattgaggcagagatgggaggaagtaggatcagaaaggctggcaggagccagatcacataggaccttgggggccatggtgaggacttggggtattttatttgatgtagtggaagccattagaggatttgaagcagggagtgacatgattacataaagattttgaagggggactgacttaggcccagcctgggaaatacagaaataaagcataaaaccatgagatgttccctctgtcacagggtttcgatacaaacaggagaggtggggacctaagaagggaaaacttctgcagaggtggagttacagactaggaatttacagtgggggcttccaggaggaggtaacactgaagcccgcccggcctttttttttttttttttttttttttttttttttttttgagacagagtcatctcactctgtgacccaggctggagtgcagtagtgtgatcacagctcactgaaccttccgcctcccgggttcaagtgatccttccacctcaactttccaagtaggcagggctacaggcgtgcgccaccaagcctggctaatttttgtatttctagtagagacggtggtcttgccatgttggccaggctggtcttgaactcctgacctcaggtgatccgcctgccttagcctcccaaagtgctaggattacaggcatgagccaccgcgtccaatctgaagctgggctttaaaggatgggcaggattatcaattgtgtgaccctgggtgatttgccaatctctgccaccttcagttccttcatctgccaaatgggcatgatagtagaactaccttactattattattatgactgggaagtagccaggaatggcaaaaagaaaagtggagaaattcggaacaattatggcaatatcacacactaataataacagctaacacttttaaaggccctattgcttcaggcaataaatttttactataacgctagaaggtaaattctgttacgagccccatttcatagaggagaagtctcggtgtgaagattaaagtaaactgtacagggttatgcacctaggaagaagcagggctgagactcaaacccaggcagcacactgtatactttggagcctctatgtgatagaaggtagtaaaatatctcagcagttaagagattgagctctgatgacaaaactaattcaagcctttgtcctgccattttctaaccatgtgacctcttggccaagtgacttctgagcctctgttagctagtcaagaaaaatgggttgtggctgggtgcagtggtttactcttgtagtcccagcaatttgggagtccaaggctggaggattgtttaagcccagaagtttgaagctacagcaagccataatcacaccactgcactccagtctgagtgacagaaaaagaccctgtctctttatttatttatttatttcattgagatggagtctcgctctgtcatccaggttgaagtgcagtggcacgatctcggctcactgcaacctctgcctcctgggttcaagtgatcctctcaccaaagcctctcaaatagctgggactccaggcacccgccaccacacccagctaatttttgtatttttagtagagacagggtttcactatgttggccaggctggtctcggtctcctgacctcaagtgatccacctaccttggcctcccaaagtgctgggattacaggcatgagccactgctcctggccaaccctgtctctttaaaaaaataaaaaagggctcggggtgggggtcattcatgagtcaattcctatagagagcttagcacagtacaaacactagccatgatcctcatggctgttagtgacaacccgggtagaaagtaagctagaaccatccagtatgtttagggaatacttcagtcagattttgtcacgatcatgctgtgtaataagctacccccaaaactcggcatcttaaaacagccattgtgtattactgctcctgcatttgcggaccagctggagggtaaactgatggaggctgggctcagctggagaggctttgctccaagtagctctcatcttcttggacaagcaggctagctgaggcatgttgtcatggtgatgacacaagtgcaagagggccagcagacatgcaaggcctgggcttggaattggcaccctgtcattcttagccaaagcaagtcatacggctgagccagagtcagggtgcactctgcctttgtttttgtttttgtttttgttttctcggagacagagtctcgctctgtcacccaggctggagttcaatggcgcaatctcagctcactgccacctccacctcccaggttcaagtgattctcatgcctcagccttccaagtagctgggattacaggtgagcaccatgatgctcggctaatttttgtatttttagtagagatgaggtttcaccatgttggccaggctggtctcgaactcctgacctcaagtgatccgcctgccttagcctcccaaagtgctgggattacaggtgtgagccaccgtgcctggccatactctgcctctttagcagaaagaatggcaaagtctcatggcagagtgtggacacaggaaggggtagaattgggaccctgactgcagtgtgccacgggggtgatagacacgagggggaagccacgttcctcccttctgccccaggtttgcacttcctgcttccagggtagctgggaactcaaggcctggaggactaaggccttggctgttgtttcttttttttgagacgaggtctcactctattgcccaggctggagtgcaatggcaagaccatggctcactgcagcctcaacctcccagcctcaagtgatcctcccaacttagcctcccaagtggctgggactgtaggcatgcaccaccacacccaggtatttttaaaaagtttttgtagagatgaggtcttgccatgttgcacaggctggtctcgaactcctgggctcaagtgacccgcttcagccttggctgttggttcttgaccattcatggagctccccaaagcccaggacagaatcaggagggcagaggacacaggaggagctccctactccctcatgggagcctgggacagggattagacctgggcggaggggctcatggatgttccaggccaggaaaggacctgccacagagcggggcagcctgaggcagtgagaggaaagacgtgtttctagctgaggcagcgggccagaacacttgggtctgcggcgtggcaggtctggggtgacccacctttcttcccaccccacagtcctgatcctggaggccatcgagaaccacaacctcgcagacacggtgctcaagatcacggacttcggcctcgcccgcgagtggcacaagaccaccaagatgagcgctgcggggacctacgcctggatggcgccggaggttatccgtctctccctcttctccaaaagcagtgatgtctggaggtgctgaaaggcgcggccgggatggcctctggggagtaagggagggaggaaggggtgagggcagagtgggagggagggtctcctgctgaagccaggatctcagtctgacaaagggacctgctggcaaggtcaggccaccagacaagtgccagttacctgttcagctagcacaaatggcaactagggggcacactggattagaataaaaagctcataggatctagagacaaggccgggcgcgggggcgcacacctgtaatcccagcactttgggaggccgaggtgggcggatcacttgaggtcaggagtttgagaccagcctgaccaacatggtgaaaccccatctctactaaaaatactaaaattacctgggcgtggtggcagatgcctgttgtcccagctactcgggagactgaggcaggagaatcacttgaggccgggaggcagagattgcagtgggctgggattggccactgcactccagcctgggtgacagagcgagactctgtctccaaaaaaagaaaaaatttaaaaaagcatagagacagcacatggatgctagcactgaaagccccctcagacactagcccatgcactgtcccatctgtcagacaggaaaatgattaattcactcattcattccttcatctaactgcaccgggttctagggatatagcagagaagaaaaatacatgcaatccctgccctcaggaatagtaagtcagtcaacatacaagaagctcttttttataaagctgttttttaagaaaattataatttttaaagacaagtacaccagaaaaaagtgttagtacaaagtgcgaggaggctgagaggaaggcactttaagggctggaagactacttttgggaacgcttctctgagcaatctgagaaatgatacttcatctgagttccaagtggcaaaaaggaaccagtcacgaaaagtttggaggaagaaggaggtgctgaggtgagcatggtgtgtcccagaaacagcaaagaggcccatgtggctgccactgtgcaggcaaggaagagagaggtaggaaattatgtaggagagggagctggaaggccctgtgggtgagggagtggccttcaggttttattctaatgaagtaggaagccatgaggagccatgtctgaatagagtggtagctcacacctataatcccagtactttgggaggccaaggtgggaggatcacttgaggccaggaatttgagaccagcctggtcaatgtagtgagaccccatgtatatgaaaaagaaatttttaaattaatttttataaaaggaagtaaataaaaactcctttggaggccgggtgcggtggctcacgcctgtaatcccagcactttgggaggcccaggtgggtgaatcccttgacaccaggagtttgagaccagcctggccaacatggtgaaatcccacctctactaaaaatacaaaaattcggccaggcgcggtggctcacgcctgtaatcctggcactttgggaggccgaggtgggtggttcacttgaggccaggagttcattcaggactagcctggccaacatggtgaaaccccatctctactaaaaatacaaaaattagccaggcatggtggtgggtgcctgtagtcctagctactcaggaggctgaggcaggggaattgcttgactgcaggaggcagaggttgagatggcgccgttgcactccagcctgggtgacagagcaagactccatctgaaaaaaaatacttaaaaataaaagctcctttgactgttaggtagagacagccaatgatgggtctgttgctgtcaccagtgagagttgatggtggccatggagactttcaacccaggaccttctgcttggttggagccaaacctgggtctccccatttactgttcccgtcaattcccagctgaggctccagattgtccaagcagcaaattaatgggtatgggactgagacagatcagacaggaagtctccagctcagcctagagcagagcagccctttgggagaatttccaactggctgtacatcaggcgttcatttgtgctaccttttttttttttttttttttttttgggacagagtctcactctgccgcccaggctggagtgcaatggcacaatctcagctcactgcaccctcctcctcccagattcaagtgattcttgtgcctcagcctcccgagtagctgagattataggcatgcactggctaatttttatatttttagtggagacagggtttcaccatgttggctaggctggtcttgaagtcctgacctcaggtgatccgcccgcctcagcctcctagagtgctgggattacaggcatgagtcactgcacccggccgggcaggctaattctttctgatgtggtcctgtcctgtacttagcaggatgcaggatatccacacctccccgccataaacttcagtaacattctcagtcattattacaatcacagtaaccccataggtttccaaggacatgggagagaggggtggatcatgctaccctccagttataaaccactgtttctcccccaccttgtatggtctccattctgaagtttacttcatgatccaaaatgactgcttgagctccagcgttttttgttttttttttttttttgagctggagtcttgctctgtcgcccaggccggagtacagcggcgcgatcttggctcactgaaacctctgcctcctgggttcaagcaattatcctgcctcagcctcccaagtagctgggactacaggcacatgccaccaggcccagctaatttttgtattatttatttattttttttaatttttcagtagagacggggtttcaccatattggccaggacagccttgatctcttgacctcatgatctgcccacctgggcctcctaaagtgctgggattacaggcgtcagccaccgcacccagccttttttttttttttttttttaacagggtcttgctctgtcacccaggctggagtgcagtgatgccgtcacaaatcattgcagcctcaacctcctgggctcaagtgatcctcccacctcagcctctctagtagctgggactacaggcatgccaccacaccaggctaattttttgtagagacgaggtctcactttgtttcctacgctggtctcgatctcttgggctcaagaggtcctcttgtcttggcctcccaaagtgctgacattacaggcgtgagccactgtgcctagctccacacgccagctttttttttttttttttttttaattttaagttctgggatacatgtgcagaacgtgcagggtttgttacataggtatacatgtgccatggtagtttgctgcacccatcaacccatcatctaggtttgaagccccgcgtgtgtcaggtatttgcctaatgctctccctccccttgtcccccaccccccaggctccaggttttatgtctacattccaaccacaagaaggggaaaaaaggaaaatggcaccccttctttttattttttgagacgtagtctcactctgtcttccaggctggagttcagtggcacgatctcagctcactgcaagctccgcctcctgggttcacgccattctcctgcctcagcctcccgagtagctgggactacaggcgcccgccaccacgcctgactaattttttgtatttttagtagagacggggtttcaccgtgctagccaggatggtctcaatctcctgaccttgtgatccgcccgcctcggcctcccaaagtgctgggattacaggcgtgagccaccgcgcccggcctcattttcttacccatgttgtttttgttcctgcgctcctgtgcctgtctgctgtgctgagctgcagatgtgtcctgccgcggcttcgcaggacagggataagttgagacaggaagcaagaagccttgcctgtcaggctgcccttggcatgactagagtgtatgtggggattttcacctcttattttggggtccattctgttccttctttgaacaatagtctttacaggatagggtgtttggggacagatttcatcttatttaagatataaataatataaaattaacccactataaatttatttttcatttaaaaaaatttttaaaagacaggctctcactctcccacgcaggctagaatgtggtggtatagtcatagctcactgcagccttgaactcttgggctcaagccatcatcccacctcacactctttcccggccgggcaccccttctttttgaggatacttcctggaagctagttgcctactacaccccctcctacatcccatgtaccagaactgtggtcatgtggcatgcttagctgcaaaggagaatggaaaattcatgcaggcagcatgtggccagctcaattcaccagcactgtcactgaagaatgggaggctgtcagctgcatatgggggcagtgattgtgtctatctcttcccaatgtctaaaatggtgcttggcacacagtaggcacttaataagtatacgttgaatgggccgggcgcagtggctcatgcctgtaatcccagcactttgggaggctgaggcaggcggaacctgaggtcaggagttggagaccagcctggccaacatggtgaaaccccatctctactaaaaatacacaaattagctgggatggtggtgcacatctgtaatcccagctacttgggaggctgaggcacaagaatcacttgaacccaagaggcggaggttgcagggagccgagatcatgccactgcactccagcctgggtgacagagactttgtctcaaaaaaaaaaaaggatatgttgaatgaatgcatgagtggatagtggggagaccagggatctactccaggataaacaccacacagaatggccatcaggatctgggaggatgtagagtttgcagaggaagatagccttgcagggaccacagcacagtgacgcacgctctggtaccatggagccactgagagcactgtcgtgggcagcaggcagacctgagtccaagtgtggctccaccactcactagctgtgtgaccttgggcaagccccttacctctctgagcgtgtacctgctcatcagctaaagcaggggtcataccaaatccttctgccttacagggctgttgtgaggattaccgagtgcctagcacagtgcctggcctgcagtaagtgctttataaatgttaaataatgttaactggtttttagaggtaagtgctgagtgttttggggaaacgtagaggaggggcctctaacctagctttggaggctgtggaatcaaggaaggcttcctgacagagggggcaacctgtgttgagacttgagggacaaatagttacacaagggaagagtgttctccacaaagggaacagcatgtgtgaaggccagaggttagaaagcacagggcctgctcagtattcagtgtggctgcaagatgaagttggggttagaatgggctgagagtgtttggaagtgaggctgcaggggtcatcaaaggccagggccaagaaggatggatttaggtgggatgcagtggctcatgcctgtaatcccagcactttgggaagcccaggcaggaggatcacttgagcccaggagtttgagaccagcctgggcaacatagtgagacctccatctctacaaaaataaaaataagaaagatggatttggccagtaggaacacgggacctgaagattttcaggcaggggagagggaagacaggccgagcaaaggagagacatcagagagccaaacccaccccatctattggagaacaaggccatggaggtcaaagcaagttcttgtgacctcattggccgggggtggctgttggggtgagggcagccctgcatgggaccaagggcagggctgggtataggtgaggattggggtgggctgcgacatcacccctccctctcccctgcctgcagcttcggggtgctgctgtgggagctgctgacgggggaggtcccctaccgtgagatcgacgccttggccgtggcgtatggcgtggctatgaataagctgacgctgcccattccctccacgtgccccgagccctttgcccgcctcctggagggtgagccggggccccgtgacgagggtaggctcagcttggagtggcagggacctgtgggcccagacctttccccttcacacctatccataccagtgggcccaggagtgaggaagaaggggctggaacccactggactctaaacagcctccccatggttggctccatcccccacatcccagcccttgtttgggccaggcccagagctctcaggacaacctgttaggattccttggccctgggattccaccttgatcctgattccactaccagcccctcctcggggtgcaggtcccagggtttctctcccagcgtttcactgagtggaattggccaggagcttggctttgaatcccttcccctcagctccatagcagctgtttgtctgccatccccagaaattctgccttcctctgagcaggctgagtccccagagcatgaccactgacacctccatgccccaccactgtccttcctcctcccaccccagaatgctgggacccagacccccacgggcggccagatttcggtagcatcttgaagcggcttgaagtcatcgaacagtcagccctgttccagatgccactggagtccttccactcgctgcaggaagactggaagctggagattcagcacatgtttgatgaccttcggaccaaggagaaggtgaaggcagggggcaaggtgggaaagatggagcaagacccctgagttctgatgccttgggctgctcagagactcctcccctgaaccccagcctttgggtccatgcagggtcaagggagccttttttgcatattaagaaaagacagcctcctgttggtggattaataagaaaaaggcaccctgtactgaagtacttacaggtgacactgcatgatgtctggggttggctttaaaatactacagcagaaacgaagagagggcaagaggagagaaggacggggatacaagattcgcaaagcataggtaattgttgaaattggatgatgggtacaggggggtgcactgttctctgcttttgtggatgtttgaagttttctaaattgaagagttaagaaagaaaaagaaagaaaaagcacccctttctttgagctaacacagttccctgccctggcacccagcttggctagcaaagcatgagtcgggtggtgaaaccagtgtaccccacagcaaggtacccttgtgtgaggcaccaaccagacgcagcagccctgggtccctccccaggaagcagagcagctaagcccctccccccagccaccgcctctccttcccaggagcttcggagccgtgaggaggagctgctgcgggcggcacaggagcagcgcttccaggaggagcagctgcggcggcgggagcaggagctggcagaacgtgagatggacatcgtggaacgggagctgcacctgctcatgtgccagctgagccaggagaagccccgggtccgcaagcgcaagggcaacttcaagcgcagccgcctgctcaagctgcgggaaggcggcagccacatcagcctgccctctggtacccacccgtgtccccagagcgccccccaagaggctgctgggagcagccccgacctaggatttatctcttccttttctttttcaacttgtttttattgctaaatatatcgcacatagtcagtgatcagcccagtgcagtggcgagcacttgtagtcccagcctactcaggaggccaaggtgggaggatcacttgaggccagaagtttgagaccagcctgggcaacatagaccccatatttaccaaaaaaaaaaaaaattttttttaattagctggccacgttggcatgcacttatagtccaagctagtggggaggctgaggtgggaggatcacttgagtccaggagttcgaggctgcagtgagctgtaattgcaccactgcactccagtctgggcagcagagcaagaccctatctctaaagggaagaagaagaaaaaaagaaaatgaccaaaaacctgtacagccaaatgagttactctagtcacccccatgaaagcagagagaacctcacagccatcccaagtgctttctacctgcccctccagacaacctcacaccatcccctgagaggaacatctgtcttgacacttaggacagtcacttctgaactttctttttcatgttatctctctttaaaaatatcttttaatctggccaggtgcagtggctcacgcctgtaatcccagcattttgggaggccaaagtgcgtagatcacttgaggctaggagttctagagcagcctggctctagaacatggtgaaatcccgcctctactaaaactacaaaattagctgggtgtggtggtgcacacgcctgtaatctcagttacttgggaggctgaggcacaagcatcgcttgaacccggaaagcagaggttgcagtgagccgagattgtgccactgcactccagcctgggtgacagagtgagactctgtcacaaaatatataattaagatatacatatatatgctgatatttgaccatttttttacctacaaaaacagaagtttcacatggatcaacctaatagttggatctcaagacttaatcagattcagattcaggtttgattttttttttccccacactgcttcccaggtaatgcattcaggagggaggcacgtagtgtctacttgtctctttctgtgatgttacaagccagaaagcagtgccttaagcagcagtggccagtggaaatataatacaagccacgtgtataattttaaattttctagtaagctacacataaaagcaaaaagaaataagagatgtcaattttaatattttttattaggccaggtggggtggctcacgtctgtaatcccagcactttttggggctaagacgggcagatcacctgaggtcaggagtttgagaccagcctgaccaacatggagaaaccccatctctactaaaactacaaaattagccgggcgtggtggcgcatgcctgtaatcccagctactcaggaggctgaggcaggagaatcgcttgaacctgggaggcagaggttgcagtgagccgagatcgcgccattgtactccagcctgggcgacaagagcaaaactccatctcaaaaaatatatatattttttaatttagcccaatatatccatgcaatcaatacaaaataattgtgagatattttaccttcttttttcacactaaatctttgaaatccagatgtattttatatttatggcacatctaaatttggacagtaaattttcattaaaaatttttttttttctgagatggggtcttgctatattgcccagggtggtcttgaactcctgcgctcaggcagcgctcccactttggcctcccaaagtgctgggattacaggtgtgagctactgtacctgacccatcaaaaatattggatctgtatttagatttcataaaagttagagttgaaaaagtacatatacatacccaagttgctccaaacatgcttaaatgtttccaataaccaaatggagtacctgttttttgttgtttgtttttttgtttttgtttttgttttttttgagatggagcctcgctctgtcacccaggctggagtgcagtggcatgatctcggctcactgcaagctctgcctcccaggttcatgccattctcctgcctcagcctcctgaatagctgggactacaggcacccgccaccacgcctggctctttctttcttttttttttttttttttttttttgtatttttagtagagacagggtttcaccgtgttagccaggatggtctcaatctcctgacctcgtgatccgcctgcctcggcctcccaaagtgctgggattacagacatgagccaccgcgcccagcccccatacctgtttttaaaatttaaactcaaattgcggtaattacaataaaataaagagttggctgggcatggtggctcacacctgtaatcccagcactttgggaggcggatgctggaggattgctcgaggccaagagttcaagaccagcctggtcaccacagtgagaactcatcctttatatatatatatatatacagtttaaaaattagataaataaaggttaaactccaattcccccattgcacaagccacatttcaaggtgctcagctgctacacgtagctactggcggccatattggacactgaggcctaggtccttgatccacaagagctcttgtgcttgtacttattaaaccacagtccattgctgagcctcaccccaacttgctgattcagggagggcccaagaatttgcattgccaagaaattttcagctgatggtgatgctgctgttctggggcccacactctgagaaccactgcattaaggaatgaaaaatggcggtgttcccattctagaattccttctctacttctacagaagaaaattccctttggtaatccctggaaccatttgcttaggaaagcttctctttctttctgcaggctttgagcataagatcacagtccaggcctctccaactctggataagcggaaaggatccgatggggccagcccccctgcaagccccagcatcatcccccggctgagggccattcgccgtgagtatctcccaaggccctgaccagtcagtcagtcagtgaacaaacattttttagcacgatgtttatacctggcaccaagccagagtaacagcaagaaagaagacagacaaggcccttttcctcattcttatcacaggaaacagatagtaaacaaataagtcagtaagcaggataatttcttttttttttttttctttttttttggagacagacagagtctcgctctatctcccaggctggagtgcagtggtgcaatcttagctcactgcaacctccgcctcctgggttccagcgattctcctgcctcagcctcccgagtagctgtggttacagtcacacatgaccacgcctgcctaattttttgtatttttaatagagatgggggtttcaccatgttggccaggctggtatcgaactcctgacctcaagtgatccacccacctcagcctcacaaagtgctgggattacagcatgagccaccgcgcccgggcgcaggataatttctagtagtgataagttctttaaaggagctcagggaagggaataaaagaggagatgtattaatcggagttcttcagagaaacagaatcaacagcatatgtttagatatatagaaagagatgtattggctgggcacgatgactcatacctgtaatcccagcactttgggaggatgaagtgggaggattgcttgagcctaggagttcgacaccagcctgggcaacaaagcgagaccccatctctacttaaaaacaaaaacaaaggccaggcgcggtggctcacgcctgtaattccagcactttgggaggccgaggcaggcggatcacgaggtcaggagatcgagaccatcctggctaatacggtgaaaccccgtctctactaaaaatacaaaaagtcagccaggtgctgtgacaggcacctgtagtcccagctactcgggaggctgaggcaggaaaatggcatgagcccgggaggcggagcatgcagtgagccgagatagcgtcactgcactccggcctgggcgaaagagcgagactccgtctcaaaaaaaacaaaaacaaaaacaaaagaaatagatgtattatgagggattggcacatacgattatggaggctgggaagtcctgcaatctgccttctgcaagccagaggtgcgggaaagccggtgatgtagttccaaatcaagtccaaagacctggcccagcacggcggctcacgcctgtaatcccaacactttgggagaccgaggcaggtggatcacctgaggtcaagagttcaagaccagcctggccaacatggtgaaacccagtctctactaaaaatgcaaaaattagctaggcgtggtggcgcatgcctgtaatcccagctactcgggagactgaggcaggagaatcacttgaacctgagaggcggaggttgcagtgagccgagatcgtgccactgcactccagcctgggcgacagagtgagactcagtctcaaaaaaaaaaaaaattgtccaaagacctgagaacctgaacaccaatgtccagtgtctcagggcaggagaagatggatatccacgctcatgcagagagcaaactcacccttcctctgccttcctagacaaaaagagctaactctctttttgttctgtctgggccctcagtggattggatggtgcccacccacattggcgaggatgatctctctttactcagtccactgattgaaatgctaatcatccagcaacaccctcacagaaatcatgtttaaccagctacctaggcgtcctttggcccagtcaagttgacgcataaaattacccatcacagaagggttgcgattttccatctggaagccctatgggaggaggtgaggtttgagcagggaccttcctgctgagtgagacaggctgagacctcagggaagcatgcccctggcggagggagcagcaaaggcaaaagctggaggtgagaacagcatgggctgcttgttaacctgtttggctggagcagagtgaatgggaggaggacataggttttgtgatcagggagttctcaggggtcagatcaggcagggccctgagagcaggataagagtctggattttcctttcttttttttttttttttttaattttcatttgacacctttggtatggatttttttgtttttaatttttgtttttagttctggggtacgtgtgcaggatgtgcaggtttgttacataggtaaacgtgtgccatggtgatttgctgcacctgtcaacccatcacctaggtagtaagcccatgcattagctatttttcctaatattctccctcccccaccctaccccccaacaggccccagtgtccgttgttcccctccctgtgtccatgtgatctatttgctcagctctcacttataagtgagaacatgcagtgtttggctttctgttcctgcattattttgctgaggataatggcttccagctccatccatgtccctgcaaaggacatgatctcgttcctttttatggctgcatagtattccatggtgagacagacgctcgctctgtctcccaggctggagtgcaatggtgcgatctcaactcactgcaacctctgcctcccaggttcaagcgattctcctgcctcagcctcccaagtagctgggactacaggcctgcaccaccatgcctggctaatttttgtatttttagtagagatggggttttcaccatgttggccaggctggtctccaactcctgacctcaagtgattcttctgcctgggcctcccaaagtgctgggattccaggcaagagccaccgcacctggcctggtatggattttcttttaactgccctggggcagcccccagagccatgcgagcaaggcactgagggaatcaaattgacctttttccctctggctgctgtaagaaataaaggtggagaaagcagtgagatgatggaggccaggccagggtgggggacttggaagggacagatgtccacagtcggggctatatggcagagacacggtcatcggagtttcctggtgggttgaagggtgaaaggctagctcccaagttccaacacctcattcaccccagcactgtccccacccacagcccccctgccctctgtctgggcacctgctttgtaccaggcccaggaggtcagtcctgcaggggacacagagacaaatacccataccatggcagcaaacactggcaccagataggtccagagcattgcaggtacagagatgaaggcagctgacccccagggaactaactacccagagctggagaccagaagcgcaggcagcccgccagaatgaatggtgaagggttaggctgtgaagaggaggggaggctggaggagttggcagggaaccgctcatggccttcagtgccaggcggaggagctggaaccttgtcctgacagcagtagggggctatggggagatatatagcagggagggtcatgactggagttcaaaagagcccttggactcccaggcggagggtgggcctgagctgggggcactggaggctgggagcccagtggggacagatcctccacccagtaaccaagtggcttctctggacccagtgactcccgtggactgtggtggcagcagcagtggcagcagcagtggaggaagtgggacatggagccgcggtgggcccccaaagaaggaagaactggtcgggggcaagaagaagggacgaacgtgggggcccagctccaccctgcagaaggagcgggtgggaggagaggagaggtgaggtgtggtgtggtcatgcccaccctgtgcccaagccccagctcccaggctccaggccacaggactgaggtctccatctctccctggaccccgcaggctgaaggggctgggggaaggaagcaaacagtggtcatcaagtgcccccaacctgggcaagtcccccaaacacacacccatcgcccctggctttgccagcctcaatgagatgggtaagagcctgggttcttgtaagggggtgggggttccctggccaaaggggtgagcctcctggggctgagcgaagagaccaggtttcactgggccagtgagtggaaggccttcctgggaagggagatggtggcccctggggcgtggggggtcatttccaggggcagggaccacccttctctgaggcttctcctggagacagattcaagaacgatgctcgtgggtcttggtcttgctgttggaggggtcatcgggggctgtcccttggcacaagtccccgtggggccctggccagccctgcagcggagtgatggccctctccggttgcagaggagttcgcggaggcagaggatggaggcagcagcgtgcccccttccccctactcgaccccgtcctacctctcagtgccactgcctgccgagccctccccgggggcgcgggcgccgtgggagccgacgccgtccgcgccccccgctcggtggggacacggcgcccggcggcgctgcgacctggcgctgctaggctgcgccacgctgctgggggctgtgggcctgggcgccgacgtggccgaggcgcgcgcggccgacggtgaggagcagcggcgctggctcgacggcctcttctttccccgcgccggccgcttcccgcggggcctcagcccacccgcgcgtccccacggccgccgcgaagacgtgggccccggcctgggcctggcgccctcggccaccctcgtgtcgctgtcgtccgtgtccgactgcaactccacgcgttcactgctgcgctctgacagtgacgaggccgcaccggccgcgccctccccaccaccctccccgcccgcgcccacacccacgccctcgcccagcaccaaccccctggtggacctggagctggagagcttcaagaaggacccccgccagtcgctcacgcccacccacgtcacggctgcatgcgctgtgagccgcgggcaccggcggacgccatcggacggggcgctggggcagcgggggccgcccgagcccgcgggccatggccctggtgagtgaggcgccctgcacccaggtcacagaaaaccccttctttcctcctctgccagggtcgcaagtccagcccagccacgacccctcaggcagccacctcctgcttcttgtggaggagggagggtctgtgtccctttaccgctcactcctggaggcatcgggggtctccaggggactgagacacaggcggcaaactgatgcctataaggccaggcaggtgcctatagcggttgtgaccagcatgaccatcgccaattcttacacagcctagacactgttctcctccatctgttaactgggtgggagatgcggccatagcagtgttattaagtacccacgtcaggcactgtgctgcttgttttaagttatggttattctatttgctcctcacctgcgtggtgaggcaccatttttatcccccttcagagctaagccatgcctgagcttagcccagtgcaggagagtcgggaagaccagggctttggcccccgaggctgccgctaagcagcagttccagaaggttgaggaacatgccagggtccacccagaggagcaagcagctgggagtggtcccagtctaggtcaaggtcccagcactgccacactacagatggaaactggatgcagcaagatccacggatttctcgagagaaaccagaacttgtgcttttcatgtaacagctctgggctttttaatgccaccctctgccccaccccactcacctcctctgaacctctcttaccaggccctcgtgaccttctggacttcccccgcctgcccgacccccaggccctgttcccagcccgccgccggccccctgagttcccaggccgccccaccaccctgacctttgccccgagacctcggccggctgccagtcgcccccgcttggacccctggaaactggtctccttcggccggacactcaccatctcgcctcccagcaggccagacactccggagagccctgggccccccagcgtgcagcccacactgctggacatggacatggaggggcagaaccaagacagcacagtgcccctgtgcggggcccacggctcccactaaggcctgcccaccaccgcccgcctgggcagccatgaatgtagcgccccaggccctgccccagcccgccatgccacaaggtgggggaggccctgggcaggatgttcactctatttattggggaaggagggaggggggggacacttaacttattcctttgtaccccagggggtggagccctgtgcccaccctgcactggggggagggtgggcagggatactcagggacagggcatcatgggggatttggcacaaaatggagcattaaaggtaacccctgccccctaccgcacttgattgtgttcctttttccttttttttttttttttttttttggagacagagtcttgctctgttgcccaggctggagtgcagtggcaccatctcagctcactgcaacctccgcctcctgggttcaagtgattcttctgcctcagcctcatgagtagctgggactacaggctcccgccaccacacccagataatttttgtatttttggtagagacagggtttcaccatgtcgaccaggctgctctcaaactcctgacctcaagtgatccacccatctcggcctcccaaaatgctgggattacaggcgtgagccactgcgcctggcctagactgtttctttccctggcccaggccctgatgctgggtcatcccagtggaacattccccccgaccccacacaccctccctgggcttctctgggtttctaaggtccaagggatgaggccctccctggtccccccaagaacaccacacaagttatgatcaccagtgacaagtgttttaccaacaaacacatgagtcgggggaagttacatggtgaggtgggagggcgagggatagagaggtccccctggattggcctcagccaattacatcccgagtctgggacccagccccactgtcttcccgctggaggctgcaacgattcatcttcagctgagtcagctggatgtagcggagcacattggtgtctgcaggggaggtgggcagggcatcatctgggtgtcccggggcagcaggtgacttccacacctccctggctcacaccccattctccgaagtatccagcagctcgctcacacagccagtagagccagagcccttccccaaagccccagtcacagtcggcagtccccagtcacagcggagccatcgcacacctctgtgcgcctgtatttgcggcaccctctgccaggaatgcctcttcgcagaggctcccgtcacacttctcatcctccagcgacatctgcaagaagtctgttctctccgagccacttaacaggaaaactaatctcgtctcggctcccacaaccctgcacctgttgtaatccctcttccttcttcattggctcttaatacaaaactgagtgttgtgtctgccctcctgcactcatgtgtgtaagtgcacacatgcacgcacacacacacacaccccaatttcctggcatcgtccacccgagtggatgagtggatggtgcaggaagtgaatgaataggtgtgcgtgaatgggtgagtggaggaatgagtgtgtgcggtaggcaggggtgggacggggtaatggagatgacagtgggtggatagggaagtgactgagcaggtgaataggagatatcagatgtggcaatgacggtagatgagaaatggccggggagatgtcagaggagcgataggtggacggatgtttgaatggcgggtgaagggcggggtggatgaatggatgagtgggcgtgtagggagtaggtgggtggcgcagccctacctagaagcagctccgcgggaggagggctctgctattctgccctgatcttcctgcctgttccctccgctgcagcccctttccccgccctgggcccagccctcacctctgccccgccccgccactcacctgtgggttcccggctgcgggcctcctgcaggtagcgcagcgcgcgtgcgtagtcgcccaggtggtagaaggcaatgccggcacggtaggtggccttgaagttgccctgctgcttctccagtaccttgagacagtactcgcgcacgcgctcgtagtttaccagctccgactgcagcaggcaagctgcgagggccccgcggccggcactctcagagcctgctggcacccccagaacccacctgactgcgaggagccgaggctccaggcggcagggaaccaggcctaagggattgctccggcaaccaggggcgccaatccgctcgcctatcgaaacaggcgcaactgcgccgctgctagggggcgccaaaacacggacaggcgccactgggcgatccacccagagctgtcggtgggcaagagcactaaggccccgcgcgggggcgagggccgggacctcgagagcctggctcagggcagacttcctcaccttgggtccacgtgcggccagggggtggaaagaatgactcaggggaagcgaggccctgaatacccgacccaaagaccatttcctgcatcccagctccctccagccacagacccctgtcatcccctacccctaatccctttccttgatcaagctctgaaggctcccccagaagcccacagccctggacccttcagccccagggcccctggcccccaagtcgccaagctctcccgattgccccctcccctcgtgccccatccccccaccccccgacggcgtacccgtgagggagtcgtaacactccacctccgtgctctccaccaggcgccgctgctcctcgctgaggcgcgccggcccggggctgctggtgggcccgggggcgggggcgggcaggccgctagggcgggccccctgcgccgccttcagctgcagcagcgctcggtggtacttgccgatggcctcccggaacttcttctctcgatagcagcgctggccctctgccttgaacgccacggcggcacgcaggctgctgtcgagcgccgcgcccaggctccccgacggctctggggtaggaccgggacgagccgagccatggcgggagcccgagcctgggcccgagcccggtggggagagggcgggaggcgggcgcggcggaggctccggggcagcgctgagcatcagcaccggggacagcgcgccgcgctgcattgtgggaaactcctgccgccgccgctgcagctaccgcatcgccccccgcggggctggtccccaccctttctccgccccctcacctccggcagccgactccggctgccccctatgggtctagggaaacccctcgagacttcccccatgctcactctcaaattaaccaagtcctagttctccagcccgccccccgaattgttcccattccccttaccctccccaacctcctgcctgctctcctccccggtgcccaaagctcccgaagatttctagaaggaaaggacgagcctgggggaaagagcaggaagacatcagcctcacggaaagctggctctcagcccactggccatttggcatatcgaatgagaacacaggatttggacccaagcttcccaaattcaaatccctgcttactttctcactagtggtatgacttagacagctcgcttaaactacctggaactctgtatcctcatcagtaacatggcacaataatatcacctttagggccagtcgaggtggctcacgcctgtaatcccagcactttgggaggtcgaggtggatggatcgcttgaggtcagaagtttgagaccagcctggccaatatggcaaaactccgtctctactaatatacaatatatacaaaatttttgtatatatacacaaaaattagcctggtgtggtggcgtgcacctgtagtcccagctactcgggagactgaggcaggagaatcacttgaacctgggaggcagaggttgcagtgagccgagattgtgccactgcactccagcctgggtgacagagggagatgccgtctcaaaaaaggaaaggaaaggaaaggaaaggaaaggaaaggaaaggaaaggaaaggaaaggaaaggaaaggaaaggggaaaggggaaagaggaaagagaaaaaaggaaaggaaaggaattaaaaataataccacctttgggattcatctgttaatttatgaaacaaatattcactgacatcctttctgtgcccagctctgtgctggatgatgctgggacatagcagacactgcgtgagcttcagaccctactctcactgggccccagttcagtgggaagacagaccagtgaccagacagtgacagccctgagcaggctagcctgggaagcacaggcagaggggtcggggccgaggtggaagaggcacaggcagaggggtcggggctgggatgtgggaggtacctgccctgggctgaggtggtgataaagtcttcctggaggagggaataactctaaaaacaagagagatctccttcttgccctcatccagctcggctgtctatgggggaaaacaagtgagagggcaaacaagtccccaggaaaggaagcatgcaggaggctttcaagaaaaaaatcgaggatgaatgagtcaactgcccttcagtcctcctttgccgcctccttagctgtgggacctgggccaagttcctcgatcctcctccttcggcttcgtctgtgcgacatgaggatagaaggcaagttaacctcagagcggttgcagagactgaattatcttatgcaggtaaggcacttagcacagggcttcatacattaatgggcaattaacaactggtgtttcttatcgtccattagactctgagtcatgtgatcatgagtgcctggctctgagtcagcatccatatatagttgttgaatgaatgagtgtgtgagtgaatggcattatgcattactactcctccccctcctctgagactctagcttgggtctcagccccaggcctccccactctccccaactccacccccacagcacatcctctagctggaggtcccatggcaggtcacatgtgacagacagaaaccagaactcagcaccttccatctcaaccagagcatctgcctctatctcttattgtactttgctgtaaaacgcttttgctgagtgagtttctcccttatccctggggtccagccttgaacacctcaggggtgcaaacattttcctctctgcatctccaaacccaggctcagttaggagtgtaaaactcatgaatttgagttcttgagcagtgcacacacctttccctacctccggtgtgtctgttttgtaatgaaaaacacagagatctggctgggcgcagtgactcacacctgtaatcccaggactttggaaggccggggcaagtggatcacctgaattcaggagttcgagaccagcctgggcaacatggcaaaaccttgtctctaccaaaaatacaaaaaattagccaggggtggtggcgtgcaccacttggaaggctgaggcgggaggattgcttgaacccaagaggtggaagttgcagtgagctgagatcacaccactgcactccaacctgaatgatgacagagtgagaccctgtctcaaaaaaaaaaataaaaaaaaaaggagatccgttgattcataaccatgttttctgacgaagtaaatgcctaggtacccaggcacagtagcacaggacaactgtacctaaaatcacagtcctgctgggatgcaatgctaacacttttacaacacctcctaggtgtcagacattgtcataaagagctttcccttttatttattttttattatttattttgagatggagtcttgcactgtcgccggggctggagtgcaatgacgtgacctcggctcacggcaacatccaccttccgggttcaagcgattttcttgcatcagcctcctgagtagctcggattatagaagcccgccaccacacccagctaatttgttgcatttttagtagagacggggtttcactatgttgaccaggccggtcccaaactcctgacctcgtgatccgcccgcctcggtctcccagagtgctgggattatagacttgagccatcgcacctggctgctttacgtatattttaactcacatcctcaccacagtgtcaggaggttggtaccataattatccccactgacacctgggcacttcccaggttaagtatatcagaccccattgataaaactcttactatccaggacttactactacaaactgatgaccttcgcagagcatcttccaggcttgggagaacctatcttcatagcccagtatatgtgatgtgttgggcttgtacaaccattaagaaatattgaattaggccgggtacggtggctcaagcctgtaatcccagcactttgggaggccgaggcgggaggatcacctgaggttaggagttcgagaccagcctggccaacatggtgaaacatgtctctactaaaaatacaaaaattagccgggcgtggtggcaggagcctgtaatcccagctatttgggaagctgaggcaagagaatcatttgaacccgggaggcggagtttgcagtgagccgagaccgcgccattgcactccagcagcctgggcaacaagaacgaaactccgtctaaaacaacaacaaaaacagaaagactgaattagttgacatctaaacgcagatatggaattgcagaatctcaggtttacttgaataagatctgaaaatccggcaacatcgaggtagcatttcttctgaccgggatgggcattctcaactcccccacagtccccatctcttgtgattttttgccagtccttaagggatcccagttttatcccgctgaatgactcttggggaagcccgccattgccccctggtggaggagttcagaatttgcattttatctcccagcaaccattaaaggaagtggtgagcacatccaatcagagggatgcgaggcctagaaagcgaccaatcaaaagcgagaggggaccggaattcgaccaatgagggcagagagcgctcagaataaaataaattcttttattgagatgagagacggacacacactgggagggttttgttttttgttgttgatttttttgtgactgagtcccagtactcagggaggctcagactggaggcggcggagcaggcaggcggcggcaaggctggtcccctggcgctggggccgcgcatacttgaggaagactgcggcgcgacccggcgcgggacctcggagcgcagcgcgggccatgcacggctcgagggtgcccagttcctcggggctgcagcagggagatggagaaactgaggcagggcaagtggttggagatgacccatccttggaactggagactggaggctgagaagaagcgtcgatgtggttccccacggacgggtcgggggctctcttgagatcgggcacgcgtcccgtcttcaactggagtgactaggcgagcaccggggagaggtggacaccctattcttcctacagggcgcggctagtgcggagtcagaacactcgaggaagcaaggaggggagctgaggatgggcagccatcctctctatgctgggtgcacaggctgagggaaaccatggttcgccctgccacctggtagcatggttagcggccctagcagctaaaggaacaccccatccaccaccagatacagagatggaggactcgaggcctgggtgatccttcgttctcagccctggaaggcaataggagcatcttctgggcctgggagactatcttccactctggggcaaggttaagagaccccagatctggactaatggggtcctcccaccccattctctcccacacccagaaaaatcaagtctaggtgccacctcctcctcaataattgtctctcattctccgagaccgtaaaaatgaccaggaaggtaagtccctgaagctgcggtgaccccatacacttcctccgccaagactacacctgtaaagttctggctggagcctggagcccgccccgtcgagcaagcggtgcgccaggctcagagccgcagccgcacgacgacccggctcccatcccgccgcctcggcctccagcaaagacagctccaggaagtaggtggcaagtaacatcacctgcaagtgaggcggggcgactgtcaggccacgccccacttcgcgccggccacgcccccaccccgcgtattcacaagggctcacctgggggctgctccctgccagcgcggccagcagcccgaggcacagcagcgggccggggtggtgcagccggaaatccaggcggctcaggatgcgacgctcggcgcgcagcagctccgcccgtgagaaggagtccgcgctcaggaggcagaggaaggcgggctgcagatgggggatgcggggggaggtgaaggagtcttggatccgggctctttactccctgccctggaaaggccccaagttccggacctcagtttcctggtgtgtaaaatggggccattgacttgtgtctggaagtcgtagagagcacgggcttgagggtcctgggttcaagacctaggttcgagttcaaaccccatcatctgctcactgtgtgacataggacattcacttaagctctctgcctcagctaccccccgccccccgtaaaacagatactactccctgcttcaccaggcagttctgataaggcactgaattcatgcatgttgacggtaactattcaagatggactagtttatattatttttatttacttttctaaattagagacgaggtcaccttggctccccaaagtgatttgttttgtttttttttgttgttgttgtttgtttttttggagtgcagtagcgcgatctcacctcacagcaacctccgcctcctgggttcaagcaattatcctacttcagcctcctgagtagctgggcctacaggcgtgcaccaccacacctggctaatttttatatttttagtagagacagggtttcaccatgttggtcaggctggtctcaaactcctgatctcaagtgatctgccggtttcagccttccaaggtgctgagattacaggcgtgagccaccacccccagccttaagacagactattctagactgagtccaagttccaactgcttgatttggggcaaatgtcttcctctctctgagcctcggtctcctcttctgtttaagggacacattgacagcccctccctcatacatgttgggaatcccagactcagcacggtgcttggcacacagtagtcactgaatcagttactccccaaaggactccatccaccctcccaaaccccaccccggaagtacctcgggaagcacgcactcttccattttgcacgccacaaacaggcaagccacgcccagcagctgcaggcgatgtagacgcacgcggccagcgctcaggtaggaatcaagcaggtgaaccgccagataaagtgtgtcaccagccagacccaggtactcctgaggaggggcaagggtgaccacggggtcctgggcggcgacgcaaactcagccccccacacccttccagatacctacgtgcacctggaccagccagtctaccaccagggcgcgcatctccggggtcacagcgcggggcagggctctcaggggcagcacgcggcacacctggggttggggcagggacgcttcactctccacacctgtgcctctgcctttctcctgagctccagccctggatgcagcagcctcctccagtcagttggacatcttaggcatgccacacccaaactggcctccaaatgagctcctcttacgtgtcctcacctagaactctgggcttcgttccagatgcctccatacccacctctccgccacgtggactcctgggcgtctccctctaggttcccagacttcactttttttttttttttttgagacaaagtcactctgttgcccaggctggagtgcaatggcgcaatcttggctcactgcaacatccgcctcctgggttcaagcgattctcccgcctcagcctccctagtagctgggattacaggcatgtggcaccatgcccggctaatttttatatttttgtagagacggggtttcaccatgttgaccagactggtcttgaactcctgacctcaggtgatccgcccacctcagcctcccaaagtgctgggattacaggtatgagccactgcacccggcctcagacttcaactcttgaccacgaatcctcaacccctctgcctcagagcacccagaagcatcttcccaaagaaagatctgaccaaggaactccccagcttaaaacccttccatggctcccagtacccttggagaaaactctgatttctttcaggctctgctccagcatcacctcttccctctctctccccacaacccatgcgtcagccacagctgccttctttttagctcctagactataccaagcccattcctaccccaggccctttgcacttcctgtttcctctacagagagggtccttccccagccccttactcgacctttccgtcattcagctaacatctccatgactttgtctatactcctaccacccgatcactatctctttgtctcagcattttcactgtgaagatgtctccctgtgtgctttgtctatttggccgctaggctgccagtcccacgagggcagggacttctgcccacaacacaagtgtctctcaggtcctaacagagatcctggcccaggagagtcgcaggcaagacgttcaacaaactcctcccttcagtcttccttccgcagcaaccctctcatagggatatctgaaggctggcgaggccaatgttttggtttgcgtggcctttccctagttgttctatgtgtttgctcatctccccagaacgaggccagcattgcagcatctccagcacctaaaacatttgctactaaaccattaaatatttgttaaacaaataaatgtggaggacaagtacaggggaccataaacaccccaggagggactgcaaagagcccggggacggtgggaaagggcattcccagcggtagaaacggcgctgtgtgaaaacaaaacaaaagcctggacgttgcagggaaggaacgccggctgccagtgatagggaggagaggctggagcggtgggagttcagagtggtgttgagtgggtgccgggcggtgggccggcgtcgccctcaccagggcaggcggcgggtaggctcaccatgacttcggcgaagatgtccccggcgtactcgcgttctccctgcagccccagcgcgctcagcgcctcctccagccccggcggcctcgccaggcgtcttggggagacagtggggcccgcggggaagccgtcggggactgcggcgcttgaaggctctgcgtcgagggaggcagcgagactctgcaaaggagagggcctgggggcccagcgcctaacgataggcccgagccgggagccggacccctggtccctgcctctcaccagcatcctccaggagggtgttgcgggcgaggccaagcaccgacccttgcagctaggggaagagacgcgcggcgggcgctttaaaggcccctgggcgcgtgcgcactgagcccgcctcgcccgggcaggtgcacaaaggtgagtgccccgcaggctggctctgtcctctcgaagccctctaaggtcggacagctggagacagatcctcatcctgctgcccggaagcagcccctctgggcctcgctttcctgaccataaagtcgggatgatttcaaaatgtagaatcagggtttgcaccgtcagaggatggatgtacaaacatagatcggaggttagaatgacccttgtggtgtcggtgtcgcaatggaattggagataaaattgtgtgaacacatggttgtttacatagaagttaagtgttgtgtggccgggtgtggtggctcactcctgtaatcccagcactttgggaggccgaggcgggcggatcacgaggtcaggagatggagaccatcctggctaacactgtgaaaccccatctccactaaaaatacaaaaagttagctgggcgtggtgccgggagcctgtagtcccagctactcaggaggctgaggcaggagaatggcatgaaccctggaggcggaacttgcagtgagcgagattgggccactgtactccagcttgggcgacagagcgagactccgtctcaaaaaaaaaaaaattttttttaaaaagtggtgtgtatgcaaacatgtatttcctagcttaatccactgggagagcttaagagcagcgacaccccaatagtgagaagcacccctaacatccaaaccctggccgccacatcccattctccactaaaaggaaccagggctacctggagaaatggctgatcccagggtcatacaagagaaggtacaagatctggaatatttttgtgtggcagaaagtgtcccaacagcagggcaagtcacatagatgcagaagtcactagctaaatctagaaaatgtgagcatcaagatgatagtcatagatcacaaaccactgaataaaattaaaatacaagtttattctgatataactcaggcagtgggaaagaaaagctcttctaatctttagaaagtgaactaataaatgtgttttgttttcagacagggtctcgctctgtcacccaggctggagtgcagtggtgtgaacacggctcactgcagcctcaacctcctaggctcaagtgatcctcccatctcagcctcccaagtagctaggactacaggtgtgcgccatcatgcttggctaatttttaaatttttctgtagagactggggtatcactttgttgcctaggctggttttgaactcctgggttcaaggaatcctcccaccttggcttcccaaagtgctaggattacaggtgtgggccgccatgactggccgaactaataatgtagaaggttggaaaatcctatttggcaaccaccacagcatcgtttcatgcaagaaatatcaatagatgttcaaactagtgggtgaacatctgataggaatcgggatatctacaaaatgtctctacacaagatgtttattaactgtgtaaaccaaaaggtatctgagataggtgtcaatcaatttagaaagcttattttgccaaagttaagggtgtgcgtgtgacacggcctcaggaggtattcggggcacagcttggttttatacgttttatggagacatgagacgtcctcaatatgtgtaagctgtacattggttcggtccggaaaggcaagacaactcgaagcaggggagggggcttccaggtcatagacaggagacaaacggctgcattcttttgagtttgattagccttttactgaatgcacaatttacaggaagagccatccatgcctagtctgggtcaaacaataggacggaggaagccatcagatatgcattggtctcatgtgagcacagggatgactttgaactctgcctgtcttctgtccacaaggaatttccttgcgggcaaatggagagacgtaagtagctttaaaaaaaaatatatatatatatatatatcttttaggccaggcgcagtggctcacgcctgtaatcccagcactttgggaaggtgaggcaggcagatcacttgaggtaagttcgagaccagcctggccaacatagtgaaaccctgtctctactaaaaatacaaaaattagctgggtgtggtggtgggtgcctgtaatctcagctactggtgaggctgagacaggagaatcacttgaaccctggaggcagaggttgcagagagccaatatcgcaccatggcactccagcctgggcgatagagtgagactccgtcttaaaaaaaagagaaaaaaaaaaagtgaggcaaccaaccctggttgagggaaaataactgcaaaataactgccctgtgagtttcacacctgccaactgaatgcaacatgtgagcctggtcattagctaggaatttttaacatacaaggacattaagcgtgaccattagcgaacactataaaatctgtacagaagagcagtttcaatgttagcttcctgaccttggtaactggagagcagttatgtagcagaatgttctttaggacaggtatacaatgtggagcgggaggtggaggggtgaatttaacattctgatcccatttttgtccgttttaagtaaaatgctatgacgaacctggcgaagggtatattttgtaattcttctacataacttttttgaatagattgacagttcccacctaccccacacccaatttccccaatgaacatctcatattagtgtgccccatttgtcacaatccgttagaccaatattcatctattaagtccatgctttattcaagccttcctttttccctacgttctttttctatttcaggaaacattacatttagtcaccatgactcttttggttgatcttggatgtgtcactttctcagaattttctgattaaccaccttggcagacaaatccctcaactgagatctgtctgatgtctgcttcctctcagtgaggtggtgtgtgtctgcaagaggaggatcagagggaaagtgccattctatcacattaaagggacactgtgaaggtgattcatcagcagtgtttgcctcgattggctggatgatgtagtgtttgccagggaccttcactgaaaagttacttttccccctctccacactgcactctttggaggagtcactgcagcccacgcctaagaagtgggggttccatagccctccttgaaggctgtctacagaaattacttatgattttgtgtagatttgcatattctccccattttgccacttagcaatagacttatttcacattttaggtgaaaacccaatattatgctatttattttgttgttcaaattcttttcagctttggccactggaagctttctgttggctcctgtgtccctgtgacttaagcatatcagtgcgtgctttcaggcactgcaagatgccccaggctcatcttgtacatttcctgccccaggcctggaataatcttagtacagcactatttttgaaagttttctgcaagtctgcaattatttcaaaatttaaagtatctgaatggctacacttttttggaaaggtactggacattaaaatcctgggatgtagacaaacaaaagcaccagcacagtacagatggatagctagtttattacaggactgctggtagcaccaaacgaaaccaagtcaattcctgttaacggggcagctgaagcggttgaggggtctaccccatggaaccccaggaagcagctggaaagcctgagttccccccatgcagcagctaaaagggaatcgcactgccgcccccgactccacacaaccatcagtgcacgagggcagcccccagaggcttcacattaactggaaaagattacacaaaaagagcaggaaactaccaatttatgatgccgtgtccatttgcagagaggtaatcagcaccaaaatgagtactcaaggccctgcgacctcgggtgaatttcctttcttatactcctgctttgctgtcttttttaatagcatgtatcatgttttttttttttttatttttagagacacagtctcattgtcccaggctgcagtgcagtgccgcaatcatagctcactgcagcctcaaactcctgggctcaagtgatcttcccacctcacctcagccttccaagttagctgggattgcaggcatgcaccaccatgcccagctaatttttgtattttttgtagagatgaaggtctccctatgatgcccaggctggtctcgaacccctggcctcaagagacccgcccgcctcggcctcccaaattgctgggattacaggcatgagccactgtgcccagtcactgttctttatatacaaaaaagaatgtgtgaaatttttaaaatgtacattgcaaaagacgattattctactcaaaatttatttggtaagattttattaagactctaagttcaaacacccttcttgggaaaagctctacaggataaccacacatgctcaactacggggccagctgctgcagctgtgggaccccatcctgtggaagaggagagaggcactaaaaagatgaggtagccaggcctgtgcccacactacgagacctgcatcaccatggtgtgaggagcagcaacgtgggtcaactcggggctgggacgagatggaagagtaaaaggcctttcttcataggcctgcctattttatgaccaccagggtagacttttgtaattaaattaaggtccacatgactttagaaagacaaactaaaaaaccccaaccaaacgagtcctagctgtagctaactctgatttctgtaaattggatctgactttttctgcttacattcacttaaaatctcaaagactcaatgggtgtgaagtgctaacaccttgcggcaaaatctcaaattcatctgtgccaggccctctgcacagcagggctcagcagggcaggccagggctctggtccctggtcccttgctgggggaggtgttccatccggccagcgcccggccatgcagccacgtgactcaagcacgggaagtgcaggggcccagacacatccaggctaaagggcagtgactaggggagggctgaccccaagctgaacagggttctaaccaaacgctcaggagctcccaggtgacagcaaccacgccaccatgaacacaccactgggtctgtactggaatttgggggcctcaaggcttccaggtggcagcataaacagggaggtggggcaggataggaatgcccccctctgaggctcggcagccgggtggaatgaaccactccctctcattcagtgacagcacaggcaccctcctcattctgggctacccagatcttccagccctgtccctccaccccacctctcttagcctaagcagcactgagggcctggagtggtctctgtccaccccacccccacatgcggggagccttcccatacccctcagccccacagcaccagctccacccaccctctccagcctgagctcctgcacacaccccagctgccctcaccctgagctcagtgccctccttgctgaagggaacggctagtacaggaggagctggggcccaggggtctgactccatcaccaaggcaaagcccagagtggttgggctggcgtgagtgcaggctgggccctggtctgaaatgagtgtctttattgcttgtaccgtacaaatatgaagacgaggagaaaggccagtagggacggagaactgtcagataacaacatcgcacacagaggaaaaagaccctcacccacccgaaccaaccccacccctccccaccctgccatgaactgtgtagtacaggagatgggatagggagagcaaacccacaaaagctaaactccaaacacccagaggtgttgctacagggaggggaggcgtgggcagggcagctcatggatcacagtggggctcctcccactaggtcagcacccctcccccacaggatgaaatgctcgggccagggatggggcccaagcccacacaccatgcacactggaggacacgctgccctcacacaaacacacatgcacacacacccacgtgtgcctgcgtcccgccgacacacgcagtccgaggcacgcacaggagtcccacagcactgacatggacgtgcactcatgttcaaccttaaggctgcagaacgtggggccctggggagagggaggggtgaggggggcctaggagcctcccttttcagaggccccccaccccaataggtaccagagatgcccacccccacccctccctgaccaagtccatggggcccaatactgtccggtgtaagattgtaacagccaaggctggtggccctccacccccgcagaggagagggtgagcccagcccatagcccccagtggggccaggccaggcccagggtccagcgggaggtaaggccagctggaaggaagccctagtaaggcacggggctgggaggcaggcaggtttggccccaaatgttcctcctgcctcatccatagggtgaggacagtttggtggggaggaggccggaccaggaggcggcacccagcccggccactcctggttccccatggtacagatcctaggatctgactccattcaccagggagcagccctaacccccagccctgcagctcccaagggcccctgcctgcccctggacattattgcttttctgcccccatagggggacagcgggtgggggattggaccgccccgtgcctggccactccgagcctaggccacggggcctggaaggcagcaccactgtctgccgggtgtcgcgtcccaccagaaggcagccttcgtccagatgcagcagcgcggaggcagacaccagcacgacacccaggccagaaactcaggcaggccccaggcgccatgcttcacccctcactggggcttgtgtggattaaaacctgaatctccaaccgcccaacagcccaggcctgggcgggaggtggagtcttccaaatgcgagtctgggcacaaaggtgaggctggaggctggaggcaggggctgcaggggccgctggggtgcgtctgggaggggcctgaagaagaactggaaagggggtgaggaggtgggggtggggacacaaaccaaaaaggctaagtaaaaagttagggggaaaaaaccacccagcggtgatggcagcgagcgtgcgtcctctgcgtgggcagactgctcactcgcggatgctggccgagtaggagaactgggggaagtgggtccgctggtccagctccagtaagcccaggctgtcatctgtgggcggcagaggtggatggggaggaccagtcaggagagggcctgggacacctgcccagactccctggggaaacggccccagctggcgggggctgcccacaggacaggacaggaaaggcccatccctccgcaatggaggccctcagccacggacccactccccaaacctgagccccgggcggcctcctctgggagtttcctgtgcccttgcccatgcgccccacagctggcagggccttctgagcctcccaccttctctctgccccacacaccaccatgccagagtccagcccagagccctgtcctggcctgcctctcgcaccctcccatccattctccacgggcagccaggggggctttctaaaggcctgctttaaccctgtccctctctgtatgaaacccttccatggctggctcccgccatgcaagcagtccccacccctcccagtggcccccagacccttgcactccagccccatgccctctcttctcaccaccatctccctggctgctgccggtccttagctatgccatgcttctcccattgctggcatcccacacgtcattcctccggccagctgacacgtttgcttcctcctctagaaagccctccctaactgcaggccaggtcggatatttcctctgggattccccagtccctggcctcccacgccctagccctgaccactccaggccgcccaccctacctgggctgggagctttccagggcagggcccagggctggctcaatcagtgctgtgtccccagcatagcccagccctgggctgagttcagagtaagaacccaaacagctgtaaagcagtgaacccagccaggctcagggaccgggctgcctcctgccctgagccccccgactgagctccagaacgtgctgcagtcaatggctcctggtggcctcaccaggtccaaagaggaccaacagcaaaagggcctgagagcagacttggggaaatctcccagacatgaagcgggggccttcgagggccctccttgagaagtgagttaagagcagatcccatccctccacccctggggcaggcacaccagcgcgggggccccaggcactcacagcggtcagggggtgtgattgtgatggactgggcggtaaattcatcatcgaagtaccttgtgtcgacctcggacgtgacctgaggtttgaagggtggcaggagctacggaggagaggagctcaggctcagggaccctgaggccaggaggcctcaaccaaggtcaccacgagtgggccaggtccctgagggtcctgctggggcaagcagtggggctcaccttcttctggaccacgtcctgccagttgatgctgaggaagaacctgtgctccatgacctccttggcatcgctgggccccccaccaagcctgtgcagagacggccgtcagcacctgcctcccggagcagctgggttcgggcagacgggctttcggagcaggcaggccctgtatggcccttaatgattctgtcttgaccacaaaccacttcacagaggaggaaaccgaggctcagggagggagctcacgtgcccagggtcagagccagggagtcagcaacccggacccacgtgtcctcactgcctggccttaccctgagtccagaaagggagttagtagggcaggctccgttcctatcctggctctgccacatatggtttggtggccccagccaggcccaggggatgccctgttcctcagtgtccccataaaataaggcagtgtcaaggatgggcctgccctgggggaagcactccctaagtgccactgtggacgttttcaggggctgtgtggggacgacacactgcgaccctacaagcgagcacccttgtggacgctgccccctccaggccgcagggacagtggcagcagctggcgctgggctgggtggggccgacgccagccctcacctctgcttggggtccttcttaagcagcccagcaagcagggacttggcctcggggctgagcgtgcgcgggaagcggatctcttccatgaggatgagctcgaagaggcgctcgtggtcctggttgtagaagggcaggcggccgcacatcatctcgtacatgaccacacccagcccccaccagtccacggcccggccatagtcattgtcctccagcacctgaggatggaggagaaatgagggctgggcccgtggccctgaggctggcatcacagtcctgccctcagggcatctgggctggaaacacacaggtctgggggatccccctacccttggcctcacacgttcctacccccaccaaccccagacacctcaggcgccaggtactccggggtcccacagaaggttttcatggtggccccgtcactgatgccctctttgcagaggccaaagtcagtgatcttgatgtggccatctttgtccagcatgaggttttccagctgttggaaaagtcaacggatctcaggtgcatgctcccaaggcttcctgccaccccagcctttccttccagggaaagatgcccggggctcctggacatcaaccctcccatgccaggctgggcccagcacacacagcctcaccctctgaggctcagagagaggccagatccaaccctcctcaccctctggcccacccccatggtacctgggaacagctgggcagggagagccgagagccaggccctgtccacccaccgtccccattgtgaactgtggttcttatttcgaacgtgggggcactagctttcttctattctttttttctagactttctgtcctttaattatgaaatatgcagccaggcaaagtggctcacacctgtaatcccagcaatttgggggacttaggtggcaggattgcttgaacccatgagtttgagaccagcctgggcaacacagcgagaccccatctccatatttcttaatatgaaaaaaaaaattagccaggcatggtggcacacacctatagtcccagctacttgcgaggctgaggtggcatctccccctggaaggccctgtgtgcccctcccggttactgaccatcccccacaagaattaacctctacttcccatctgtaccactgcacacagacacacctgtgaactgtggactcacctcctctgtgcggctttccctcgacattagcctatgagacgcgtccacactgtcgtgtgtagctgtagctcattcctaactgctgtgtggcgtcccactgtgagaacactccacagtggatctgactgttcctctcacagtggatacttgggttgttccagttggggctagagtaagtcctgctgctgagtgagggggacactttctaaggtgagtgtgtgtccccacttctcctgtgcacacagctagggcagatgactggtgctcagctttggtggacactgccaaactatcttctaaaattggccgggcgcgggggctcatgcctgtaatccaagcactttgggaggctgaggtgggtggatcacaaggtcaggagtttgagaccagcctggccaatatgatgaaaccccgtctctactaaaaatacaaaaattagctgggcatggtggcgggcacctgtaatcccacctattcgggaggctgaggcaggacaatcgcttgaacccgggaggcagaggttgcagcgagccgagatcacaccactgcactcaacagagtaagactcctcaaaaataaataaataaataaatacaaataaagtaggtattgtggcagttgacactccgctagtggcctaggagcgctcatgggaggcttgggaaggtccctacttggggcaacttgccacagagccaccaccctggaccttggtggggagcctggtgaatgagggcagccaccaccctggaccttggtggggagcctggcgaatgagggcagccaccaccctggaccttggtggggagcctggcgaatgagggcagaagctcagcccaacttccccagtgtgagtcccatgtggtgtgcatgccacaggtcagcctggcgcacaccctgccactaaccttgatgtcgcggtataccacgtcccgcgagtgcaagtactcaagagccgagacaatctctgcaccataaaaccgggcccgctcctctgtgaagacacgctcccgggacaggtggaagaacagctgcaggaggaaggggtggggagaggaggtcaggccccagcccacccacctgccctcaccttcccagccccctgccccagcgcagtgatgtggtgacacctgtatcatgaaccagcaagtgacagctagagggaccaatcaaggcagagcgcagaagctcataagtgacacagagctggggggaagggcgagggtctgccaggaggcacccatgagagggtatgggagagacatccgagacaggagggaggatggcatggaggcaaaaagaagcacacgtcatgaccaagtaacaataggccatgggcaagcccagatcagacagatgagcaaaccacgcatcccaaagcaggtgtgccaaccactgcacagagaaggcgcgaggcaaggagtgggtgacaaaagtgaggcgactctgtaaggggaagctgagcggctgcgggaattcacttcgagaggacacgggaacggagggctgctaggttttaacccttgggggctttctctggggcctttaagaccatccttcccagtgctatcgccccacagccctctccacacctctctggactggtttggacctgacccacccactcactagctgtgtaaacttgggcaagccacttaacctctctgagcctcagtgactgcccccccaaaatggagacgaagccgcctgcctcaagggagaggggcactagatgacactgaaatttccctccacccttccatctcacccacagctcctctccatcccgccccaccctaaagaaggaggccccagagggcaaagtcaaggcagccgcggctcacctcacccccgttggcatactccatcacaaagcacaggcggtcgtgggtctggaaggcatacttcagcgcctgggggatgaaggcagcagggtgggaggtgggagggaggagggctctgctgagccatgccagggcagggccctggccctgcttattctgcacacacacaccctgccctggctggggcccccaggagtcagccatatggggttcacataccggctgcaccttttggggcattaagtgaaggcatggctctgcggtaggaaagggttacatgctgaaccatcttgtcctctgcctccatcaggcacagccaagggagaactagagctgttctgagcaaccatggctcttgtttttacagtaaaatgtgttcaacttacacacacaagtgatgtctgctgtggctgggagtggcaaaggcttgggagccaacttcaatgacaggatggacaggctgtcagtcaacaaacagtagttctccactgcactaaggagatctacagagagttcctcagagactcccaccagggggtccttcagctcatgacaactcaactattctgttttctgcactgaggtacctcataagattttatttgaaaaagtactgtggcttaataggatacctggacagcaactgagataaagaaatgatacataagccatcctcaatctagtccatttaactggtggccactggccttgatggagactgcagcccaaacaggcatctactcagtccaggctgacagacaacacaatgctaacacatctgcttctatgagcatatctgaaaacaaaaacaaaaaaaataatgtttccacttcaaccagctgggctaagtgctcctaactcatagagacagcagccagcaaataatgtgatatcttcagttagttcaaatgcttacatgaagccaccatctatgaagaagctgtcaccctcccactccccgagcctgctcacccccaccacatgtcttggttcggatgacttggcagggcgcagcaacaccttgccctgcccgcctggcctaccccaagactgtgctttgtaccagaagattagggctctctctctgagctctgtccaaaggctggcctcacactgtctgggaaggggagggcaactcacagtgaggaacgggtgcctggtgttctggaggacccggctctcggtgactgtgtgagcgacttcatcctgcagacagactgcgggtgaggggctggtgggcaacaccacacctgcccactccgccccgacgaaggggagcaaggccttgtgaaatgcaattccattcccagccataaatgcagaaaatcacaggagtgaaaagtgaaagcctgcaaaccctcagcaaatagcagacccagacgaggatcatcagtggctctcaaagccacaggtgaaaagtcagcaggaatgtcacaatgtaaggaccaggctgctagggacaagacacctgtgacgtccctgcaagggagacaaacagacatcacgagagccccgaggtgccaccacaggctgtgggaagtcccacctagaaagcattcttgcccaaagaaggaaaaacagtgcttcttggtgtggtccccacacagcacctcagcaccgcctgggaactggcagcaatgcaaattcctgggacctacccccaggcccactgagtcagaaactcggggtgggcccagcactgtctcacaagccctttgggtgactctaattcaggttctaatttggtacctgactgtacagcagaaccaccaggagtggttccaaaaatctggagccacctgcagcaacgtgaacacaggctctctctggggcaagtttatccccaggggacacctgagaatgtctgaagtcttttttttttttttccctttttttttttagctgggggtctggctctgtcgcccaggctggagtgcagtggtgtgaacatgggtcactacagcctcaacctctgaggctccactgatcctcccacttcagcctcctgagcagctgggactacaggtgcacgccactatgcccagctaatttatttttatttttacagagacagggtcttgctttgttgcccaggctggtctcgaactcctgggctcaagcgatcctcccacctcagccttctaaagtgctggaattacaggcgtgagctgtggcgcccaacccaaaagtcatttttgattgtcacaacttggggagctagtattggcttcagtgggtagaagccaggggtgctgctgaaaccctagaatgcacagggctgccccgacagcgcagaatcatctgtcccaaaacgttaacagtgctgaggctgaggaaggctgccttaggcccaatcgtcacatcaggaatgaacagctaatttggttggctctgatggcagcaccacatgattatattctttacagtcttcatctgtcaggacacatgttcaagtatggatgagtgaagtgacgtgttgtctaggacaggccttaaagtattccagaacaagagggacaggcagagctaaggaaacaaggctggctaaacgctgataactggttaaactggacaatggctacatgggggtccgtaatatttattttctttttaaatttttgaatgtctttggaatcttccactacaaaaaattcaaataagggaaaaagtagaattccactcctggcccggcctccacctgggataccctgagcaaagcccgggactccccaacagcgacgtcctccccaacaggccccagcctcccttgacagtacctgctgggtggggccccgaggctctctctctccacaggcacccccagcccctaacatagggtggaggtggggactcagcagcaaggcctgctgctcctctctgggcctcaggctcccccttttctgactagggggaatttgtgggggaaataagcccacagcagcagaaagcgcgggtaagcgtccaggcctcagggtcaggctccagaccgcagcccccacagaggctcgcgagcgcaattcccggggcacgcaccttggcaatgatgacttccttccgcaggatcttcatggcgtagtagcggccagtggccttctcccgcaccaggatgactttgccaaaggttcccttgccaaggagtttgagatagtcgaagtcattcatggtctgccagggacagggagagtgggggcagtcagcgcctggctcatggcccgtgggaggaaattttaacaaaagaaagaggaaaaccaaaagacactgttgccaaacggcttaggctggagcaggaagggaggctctgggcagcaactgtgtgttctgaagcggccttcagaccaggctctgcaggcacagggccttgggagggctgggctctgacgtgggggtagccaggtcttcaccaactcccaggacgaacctgcagtgggtccacccaaggttgctccctcccctacgggcatggagcacaccctagggcacctgccacctgaaatcaccccaccctgcagggcagccttgtctctcagctgagccccctgaactgtgttatggaaaccaaggagagcaggccagcactgggggtgggggcaccgcaggctggcagccccacccctgctcccagcacttaccactttagcccgtgccttgctgaccgccacttccatctcctcagtcgtggaggagtcactgggggagccacacttgtagtccatggggtcctcgcctggggcccgctgcttgaggctgttggcgaccatctggatggcccgcatccactcctccctgtgcagggacacacgtgagtcccagcagccaggagtcctgggcctcagagtcgaacagctgagtgccacctcccagccacccccagcaacaggcaagcaaatgaccacataaccatgggaatttgggcaagatctgtcagaaccagagagagctgaagggacctgagtgaaattccacgccaggcgcagtggctcatgcctataatcccagcactttgggaggctgaggcggatggatcacaaggtcaggagttcgagaccagcctggccaacatggtgaaaccccgtctctactaaaaatacaaaaattagtcaggggtggcattcgcctaatcccagctactcaggaggctgaggcaggagaattgcttgaacccgggaggcggagggtgcagtgagcagagatcgcaccactgcactccagcctggtgacagtgcgagactccgtctcaaaaaaaaaaaaaaagtggaataccaagagcgatcaccaatttccctaaagtgacctggcctgagggccatttgaagccaggcagcagggaaatgatcaaaaaggagtgaccctctcttttcacagccccttgaaaatgagccaccaccctgagccttgaatgagggagagagagtgctcctgtgaattcttcggaacaaatgacaagctcaagtttataagttaccaatgttttgtaaagttaaaccaagagtaagaagcagcattcattagccaaaggagctgaagacactgcaaggcaagagctggcccgcaggactccctggaggggacagtccactgggagcagggagtctgcatggcagggacagaggtcctggcagcccagggatgtagaggagagaagctggtggacaagaagtaggtcccagcagaagggagcctggtttaagaacagttaactagaggctaagcactgtggctcacacctgtaatcccagcattttgggaggccaaggtggaccaagtgcttgagccgaagcgttcaagaccagcctaggtaacaaagcaagacccatctcttaaaaagtttttaaaaaacaaaaataaaaaataaaaacaggccaggtgcgatggctcacgcctgtaatcccagcactttgggaggccaaggtggaggatcacttgaggtcaggagttcgagaccagcctggccaacatagtaaaacccagtctctactaaaaatacaaaaaattagccgggcgtggtgacgggcgcctgtaatcccagctactcgggaggctgaggcaagaggatcatttgaacccgggaggcggaggttgcagtgagccgagatcgcgccactgcactccagcctggacaacagtgcgagactccatcccaaaataataataaaataataataataataataataataataataataataaaataaagaacaataaactagttctgtcactcatggtttagaacttgctgagaaagaactgtctttgagctgggctcggtggctcacacctgcaatcctggcactttgggagactgagacgggacgatggcttgcatccggaagtttgagaccagcctaggcaacatggatacccactttgtagagaccaaagataaaaaattagccaggtgtgggggcacatgcctgtggtctcagctactcagggggctaaggtgggagaactgcttgagcccaggaggtggaggctgcagtgagccatgatcataccactgcaatcagctaaaaaaaaaacaaaataattttctttggatacttacaaactgttctgtctaataagtgaaaatgaccagagaccaaaatgaaaaatatattaggctgaattacaccaaattgtccacatcccccatttttgaccacactgcaattaggtgtttcaacccaacgcattttgaaccccccgtgtattttgcttgtatctagaaaatactcatatgaccaacaagaaaaataaaatgttcactaagaatgagaaaattcagagagtgtaatcacgcaaatcccagtgatttaaataagccacagggagtgcagccagcccttcacagcatcttccaggatggcccccgccccagggcaagtgtcactgctcctgtgttcctgagacactggggcccctacccaaggtcaggcagggaacaagtgtggctgggactgggcttcaaaatccaagccgggacaccctgctgggctgtattcctccccagtctcgtttcctggtgtaccacgcgaaactacttctatttccatccatcccacaacgcaccctcttccacattttgacactgctggaatgcagattaatctcacagttggggtctgtcttgatttaactgggcacgcctttttcttggcactatatgaaacagggtgcctccccaatgacagcgccttcgatttgatgaaatatcacagcagtgtttaatacacaggctgtcgtgaggtagaatgcctgtgaggcatctgtgcaatgagacattctgcagctgggggaaagattgaggcaggtctgtatgctgacttgggatgatctgagacttcttaagagaaaaaggaaggtgcagggatgggcaaggtagctcactcatgtaatccctgcaatttaggaggcagaggctggaggactgcttgagcccaggaattccagaccagcctagacaacataagaagaccacgcctttataaaaaatttcaaaattaaggaaggtgaagaacagtatacagttctgtgctcctaagttagaaaataatgaacttctgcagacacatgctcacataggcacaaacatctccagaagagaagtcatgatcctggagccctgcctgcctccaagggaggggaactgggagtcgaaggaaaggaacagcctctaataacaaatgggaagcacttgctatcatcaactatccctactcccacccattatgaaggaggaactggggcacagattgaaaaaacagattccagaaaaacagcagttgctccaggcttggtagctggaattacaaaaggcacgctgccctccccacccactcagagactggagtccccataacccatctatgtccaccccacggaggcagagatttccacctgctttgaacacagttctgcccccagaactcatggtggatactcagtagatacttgggtaatgaaagagtgaggcagccaaagtccaagtggccccagggccagggcgcagcagggcccagtgcagacccgggcagagcacgcactgagccctggtgcacacccgggcagagcggtgttggcttctgcactccctggcccaacatctcaagccagtatttctcaacttgctttaacccatgcccccttaggaacaaattacagcctaattcccaaaccctacactaatattcctgtttttcaaaaaaaaaaaaaaaaaaaagcaggggccggggacagggcaggagcccattccatgacaggcttttttcttttttgtttctttttgtttttggagacagagtctcgctttgctgccaggctggagtgcagtggctcccaggtttaagcgattctcctgcctcagcctccagagtagctggaactacaggcacccgccaccataatttttgtatttttagtagagacagggtttcaccatgttggccaggatggtctcgatctcttgacctcatgatctgcctgcctcggtctccccaagtgctgggattacaggtgtgagctgctgtgcccagccttccatgacatgctttatcagacatagttgtcctctcacaaattttaaatttttttaatgctgactctgagtaaatgatggcggattgggaaaaaaaaaatcacagatctcctaagagatacagtgaagatattaaaaaggaaaatatgtctctcatatataaagatcttgagagactgtcacgtgaagatggcagattgcagactaagatgtacagcgtggtatcatctttgttttcaaagacaggggtggagagaacacagatggtccctctgtggagagaacccaaatacatgaaggatggcactgccacaccaccagcccagaagcagctctgggaggctactccagatgggaatcaggagcacaggccctggacccaccccagctggggctccaagagtggctctgccacctggaccagctcagccctcccagctctcccctccaccagggcctgggcctggggctaagaggttggcgggctgtcggcgcagagcaccgcgcgcagggcggggtggaagggagggtgccgaagacactcgcaggggcgggcctaccccacctaccctggctcccactgcccaccctacagaaagctccagaaaccacagcaatgcaggaggttatctgggagtaactggggctcgcctgctgcctgactagcttccgatccaattctaactggaccaaagttgcaaggttgcagcactcagaattccagatgaaaagcaagggcctctgtccaggatccttctcaagggtttgcaacatggcgtctggggcaaaggggagctccccatgaagctgggcctcaagtatcttctagcccccagaggagagcccctgggtaaaccacgactgtaaaaataacagcactgagtggctagctccagacaccacctcgcttgattctcaagagcactgcaattctcaagagccagcatttctgctgtggggactgaggcacatggaggtggagtcacctgtgaaggtcacacagcagggatgtggcagagctggcactcacctgtgcacagcctactcctccttagcaccacccgcctgtccctgagcctcagtgaagcgctgaaagctacacgagactcaggagggtaaagcagggaccctctctagggaaggctcatgggacacccagccagggagcccacgggaaaagcaaaggaagaactctcctcgtaagccatgatctgcacccgcttttcagagaggggcccccacccctgccactcaacagcagtcccaagaacaccttccacttgcagaggctggtaccactgtgcgttatggtggaggactcctgtcgccctcccagcaaccctgtgtagtaggtactgccattcacttcatgctaaaatgacaagaccgaagcacagagaggctcatctgcccaccgacagaggccagggacacaagaagtgcccaggcacttctacctccaagagcacttcccccatcggtattttctggaaccttctcatcctcatttgggctcagggccaggggagggacatgggggagccacgttcgccataccaacactgggaagggcacagtacggggcaagcacaggctctgggccaggagctgtggggtcattgccacccaatgcgctgcctgccttccgtaccagctggggacctcacagtgggtgagaggacaggctctgggggatggcctggacgtggatcccagctctgccccttcctgcaggcaacactgggcaggttgtatgcccttcctgtgcctcggtgggtgaggcactagagggtcctatcagggtgaaatgagacactagacataaagtgctgagagcggtgcccagcacattgaggtctcagaaggctgtcatgagagttcacccagccggcctgcaaatgtggagcatttctgtgcaccaggcttgttcagggcactgtggatgcagcaggggacaagcccatcatggctcctgacctcaaggggaggacaagtgtgtagaagctccaaggcgggggccaaacagggagactccttctcagagggcagtcaggggaggcctgaggagatgacgtttaaaccaggacctgaacaatggccatccccagtgcctagaacaggcccttggcacacagctatgaaataaatgaaatggagggaaggaggcaggggattgggagggaaaggaacccaggcagagggaactgcatggcaaagaccccagggcaggagcaagctggggtgtctgtgaaaggcacacaggtgccagaatggctggagccaacagagaggagtggaggagatgaggacagagaggagtgcaggagatgaggacagggaggagtggaggagatgaggacagggaggagtggaggagatgaggacagggaggagtggaggagatgaggacagagaggagtgcaggagatgaggacagggaggagtggaggagatgaggacagggaggagtggaggagatgaggagagagaggagtgcaggagatgaggacagggaggagtggaggagatgaggacagggaggagtggaggagatgaggagagagaggagtgcaggagatgaggacagggaggagtggaggagatgaggacagggaggagtggaggagatgaggacagggaggagtggaggagatgaggacagggaggagagcatgcccagaccgctccggcctctacgtgccaccatgttagagatctgggtcttatcctcagcaccacaggaagtcgctgaagggttttagtcaggggggaacaggctccaaatttctgttttaagtcagtagctgctgtgtgggctacggactgggggcagtgagaggagaccccggcatcctccaggaaagagatgctggtggcagaggagacagaggtaagaaaggtaccagtgctgcgtgtgccaaagctgccatgggcaggccctgcgccagtgccttcatgtttacttcctcctctacaccacatgacagccagggaactgagccccactgagggagagacacggcagctggcctgaatccagggcctggaccccagccctgggccatcctgcggggcaccccagagagaagctcggcgaagcagaggtggcagggctgtccttcatgcacaagcccgtcctcaccgcttcaggagtgacagctgactgtggggactctcccctaaccatcacctccccgacctagaggggcatttacagctggagggcatctggggccctccctgtgcacagatagtctgccttgtgaggagaaaataaattaatatatgaaaagtcctcggaacaggatctagctcagagaatttaattattttttatttatccaacaaacatttactgaacacccatttgtgtgccagatacatacataaatataaatgtcccacttggtggacaggtgctatgaagaaaagcacagctggggaagggcaagacagcgaagggaggcagggcaggacgcactggggtggcaacactggggcagagacctcgtggagtcggggagagctgtgatggcatctcagggaggaaggccttagacaaacgcgacagcaagcgctgaggccctcgggcaagagatgtgctaggcatgtttaaggaacagcaaggagacacgtggctaagtgagggtgcttgtggtaggaaatgcttctggagaggtcgctggatcatacaggactctgcaggacacagcacggaccttggagtttactctgagtgggagtgaaagccattcagagttctaagcagagaaaatacatgataagatttacatcaaggccaggcacggtggctcacgcttgtaatcccagcattttgggaggccgaggcgggcagatcacctgaggtcaggagttcgagaccagcctgaccaacatgagagaaaccccatctctactaaaaatacaaaatgagctaggcatggtggcgcgtgcctgtaatcccagctactcaggaggctgaggcgtgagaatcacttgaacccaggaggaagatgttgcagtgaaccaagattgcaccattgtactccagcctgggcaacaagagtgaaactctgtctaaaaaaaaaagaaagaaagatttacgtcaaaaagatcacagatggccaggcacagtggctcatggctgtaatcttagcactctgggaggttaagatgggcagatcacttgagcccaggggttcaagaccagcctgggcaacatggtgaaaccccatctctacaaaaaatacaaaaattagcctggtgtggtggcaggcgcctgtagttctagctactagggaggctggggtgggaggatcacctaaatccgggagattgaggctgcagtgagtcgtgattctgccactgcactgcagcctgggcaacagagaccccatcaaaacaacaacaaaaagatcatactcacctgatgcactattaagtattcttgcctgccaagaccaggggtctgcaaactttttccatcaaggaccagaaagctgggtgtggtggtttgtgcctataatcccagcactttgggaggtggaggagggaggattgcttgagaccaggagttccagaccggcctggacaacatagcaagactctgtctccacaaaaaaatttaaaaattcgccaggcatggtggtgcatacctttagtcccagctactcaggatcctgaggcgtaaggatggattaagctcaggagtttgagactgcagtgagctatgattgcaccgctgcactccagcctgggcaagagagcaagaacttgtctctaaaaaaaaagttttaaatttaaaaaattttaattaaaattttaaaagggccaattattaaattttttaggctttgcaagacagtctttgtcacaactacttaacccagccacagtaagccaaaagcagccagactattcatgaacaaatggacatggtcatgttccaataaaactttatttacaaaaatggaaggcagggccatagtttgccaaccctgttcctggcctaattctagtttacaagaaatacaaacatggggaacaaaagtaaacaacaccaaaaggcaataatatgacacacccagaaggtgtgacattctacaagacaactagcctggcttgtcaaaaaaataaataaattaataaaaaatcaatgtcttggggaggaaaaaaaaagacaaagggctgaactagattaaataaaacaagtcaaagagacatgtaccttgaatgaatactggttttaaaacaatgttctaaaggttgcatatccttcaaaaggtaactaaagaaattcaagtacggcatggataaggagaagttactagtaaacaaagattataatcatctcaggcgtgacagcatcatgattctgtaggagaaagtccttattcttaggagatgcctgctgaaacactaagaatgtcactaagtatgaacacaagttcaagttcagcataaaacacaaccagatgaagcagacacggtgaatgcgggactgcagagtctaggagtggggcgcgtggatgtccattcattatactattctttcaacttttctccatgtgaaacacgtctgcagtgaagtgggggacagggaggagggtctctccagctggagaggcaaccaggagcccagtgaggaggcgctgcagcacctagccaacaagcagtcaccgactggcacccacctgccctgcaacccctgcctccctccccaggcttaagagaggccagctgacatcagcctgtgtgggccagggctgtgaggacagcatcagtcagccaggagcagagtggagggggcctccctcttgctgggtttctggttcaccccctccacccacccatagttaaggtcagaaatctgggacctggtctcttagtcgttccagcagttttctctttggcaacagcagcaggtaccaagaagaaaaggcaggtggggctctccagcctacagaatcttggtaaaggaaagggcatgttgtcttgtgaaaatggaaacgagaccatctctcctgcctactaaaacaccttgtcagctccaccttgtcagtacctgatgtgccaggtactgctgcatcagccgctcctatttatcattcccctgcatcgtgtaactaccctgggacaaaccgcaatttactaagtgcctgccaagccctgtggggatctccacctggagtccaaggccttggctgagctctccagcttcgagcgcctccacttcccctcttccaacactcctggccccttggttctctggtgacacagaaccccctgtagtctctggaatgcatgagctatttcacctccaggtctttgcatatgctgtcccttctgaactttctccttgctatctccgtggccaaatcctatccagtcttcaaaacccagctcaacacccaggacctatacacccactggtctcgatctgtttttactggccattcatgttttggtccatagttttcaactgagtagcacctcagctggcttgagatggtaattttgttcccctcagtggggcaagtatattttttaccttgggaggatgtgcaacaataattatagtatagattatagtaacaagtctcatgatattgtgggttcctgagctgtactgtccaagaaggtagccactagccatatgtggctctttaaatcaattaaaataaactagaaaaaatccattccttggtggctgtatttcaaatgctcaatcggcacaagcagtcagcacaggcaatcggcacaggcaattggcacaggtgcctactggacagtgcagataaagggcatttccacaatggccggaagttttcttggacggcatgattttagggctctctagagggtctgctgaaaccttaccccatagataagctagaagactgtttctcaaagtgaggcccaaaaggacaaagtgggaaaaagaaacatttcccactgattacaaagggcaaagctccttaatctataaagagctaatacataaataagaaaaagaccaactacccaacagaaaaatagacaatatagacacttcagaataggaactcacatggcccttgagggtcaaactcatccacagagaaagaaaggaaagttaaacaccccgaggtgctgaatttttccactgctcagactggtacaaatccaaatgtttgaaaacacaaggccatgggggcactctcagacatcgcctaatagaaacatcgcaaaaccacaaacttattttccctgtgcctcggcaatcctgcatctaagcactcgtcacacaggtctacctgtgcacacatcaaacgagacagacacggctatttcactgcagcattccttataatgagccaaaggctggaaacaaccccagtcatcacaataaagaacggctaaataaacacacttgggacacgcatgtccaactgtccaaaaaaaaaagcaaaacatgaaacaaagcagctgcatctctccatatatcaaggcaaattccccaaggtacactaagggaaaaagcaagtccagaagcatgtacaatgctaccttttgtatttaaaaaaaaaaaaaaaaaggcagccaggcacaaaggtctccctctgctctttgagggcacctaagaacagtgattaactggggggcagggaggtggatggaaagggcagggtaggggaagctcccactagacacctccttatactgtttcaattttgaaatagatgagtctttatcatctcttctgattactaaattgatctttttaaaatgactctctggaccacctgcctcaaaatcaatagagatgctcattaagaatgtaggtcctgccgggcagggtggctcacacctgtaatctcagcactttggaggccgagggagatcacctaaggccaaaagttcgagaccagtgtggccaacatggcgaaatcctgtctctactaaaaatacaaaaattagccagatgtggtggcacgtgcctgtaatcccagctacttgggaggctgaggcaggagaatcacttgaacccgggaggcggaggttgcagtaaactgagatggcaccactacactccagcctgggcaacagagcaagactctgtctcaaaaaaaaaaaaaaagggggtcaggtgtggtggcttgcacctgtaatcccagcattttgggaggccgaggcaggcggatcacctgaggtcaggagtttgagaccagcctggctaatatggagaagccccttttctactaaaaatacaaaaactaagccgggcatggtggcacacgcctgtaatcccagctacttgggaggctgaggcaggaaaatcgcttgaacccaggaggtggaggttggaggttgcagtgagccaagatcatgccactgcattccaacttgggcaataagagcgaaactccatttcagaaaaaaaaaaaagaatgtagctccctgaccctgggcagatctccaggtagtcacaggtcttgaggcgaggcccagcggtctagacatttcacgagctctgcctgtgattccgatgcacccgcaagtcaaagggcagagtagggtcttcagactaagaaccccagctcttctcagccccagctggagagaccccccaaccagaagcgcagataggaaacccctatgtagggtcccagggaaaatctctccagctgtaccttttctcctcacaccaggcttgctccctctcaagggcagccacacagaggcccagactgacctctcgtctggagaatccacgtggaaggtcctctcgatgactgtggtccactgcaggcagcgtatgacaaaggtgttgggtcgcggcctctcggtcttcatcagctggcattctgcaggcagagggaacagacagcagggggctgaggggatagccctgctagcctgcagcccaaagtgcccgagccacctcccacaggcctagccccatgctagatggtgctggggacactctagggactgagacagccctggtcctgttctcacagggctcagggtctagtgtgtgtgtgtgtggaaggagagaagcccaccagagagtgatggctccatagacagggccgcgatggggacaagcctagaggtgtgcagaagctcagaggtagcatccaacccagcctggggggttggggggcttcccagaggaagcagcttctctgaactaagccctgaaggaaaagggaacttagagggtacacggagaacagacgctcagaggtgagaggaggttcaacatcctcagggggtggccaattctgctccaagggtgaggaggggtaagtgagagacagccctggagaggtgggctggggccagccaggcagggctttggaggccatgggaaagaatctggactttgtcctcagggcagcagggagccatagaaggctttagatagggaagagacacaaacagactgagaatgatccctctggctgccatgtagagggtgaggctggaggttggaaggccagggaggtggggagccagctagggaggatggggccacaccagagtggagccctgcagacaggccatgggaagagggcactgaggaccaggcccaggcctctcggcctgctgtccctgagacagagacaggaatagagctgggagaggcctgaaggtcaggttgggatgtggcacttatgaggaccttgaagacacttggggagatgtgtccaaggagcagcctgggacaggctgggagttctagtgagacactgaggttgggaacagatgtgtcagggtcaccagcacatgtggagagcaatcaggaaaaggcttcatgcagagcagcgtgggacggggactgggttccacagcatggcaggagaggatagtggtctgagctaaggcactggcagtggagatgggggtgcctctgtaatgttcttagcaggcagaacaacaggacatggtgacccatcaggtcagcaaggaaggaaggcggcagaaaggggcagcgatgtggacaggaccatattctccaaggctcagtcaagagcttggggcttgtgaaacttcactgccagggtctggctggaagacatccctttgggtattacagagggacagaggacgcgaggccagccctgtgaccagctgagtgggaagctgtgacccctctacgtccgagggacagaggatggaggctgttaccaaagcacaggatgggaggcacctgccaccagttggggactccaaggcctggctgacagaagctggaaccacaaggaggcgatgcatggggctgggtgtgggcaaatgccctggcttctccctccctcccactctgcatctccccgcaggacagccccgcctggccagctaacaaggagggagagcaggggaagggtgaaaacagatccaagggcaagcaggcccaggacaggcccatggctcaatgaccaagtcccacaagcccctaagacgtgccagccatcctgtgagcaccagaacactgacccactcatcccaagacacacctgctacggagaagttgtttaaggggggtagagtctgatcaggggcctcgggcctctccttgtacccaatgaaggagccgtcgctcttcagcaggaagtaccgtggcctccaggtcttgatgtattcacctgaaatgaggcaggaagggagggagagaggttaggacaaggttgagtgatgtcccaggtaggcggcaggaggcccagtgtgacggtgactcacaaggggtaccacggggcggggaggtgcgggggacacacgagaatgcctctcccagaggagccctccaggtggcccctgctgacgcaggctggggcactgggctgagcccgggtgatccacaggtcatgcctggcaggaaggtgccagcagcagtgccctggggcaccagttgcctcagcgtgtggcaaggagcaagctgtctgtgccagctcctggcctagtcccaggggaggcccaggcttccaaacacacatgccctgtggccctgtaaggccaaatcccatgggctgggattcaccaatacagctgtgcaggtagctccaatgccaaaacacttctgtgccaggcagggtggcactgctgccacaccctcccagcgccccttgactctttccaactgttcttcaccatgaatatccaagcaccctatgcacacaaacacacacacacacacacacacacacacacacacgaacccactcatcagagagctgctaaggattaaaaggagatggtgaaacacatccacacaaaaacttacacacaaatgtcctcaacagcattattcataacagccatcgagtggaaacgaccctaatgtccatcaacaacgaatggataaacaaaatgtagcagattcatacaacggaaaactattcagtcataaaaagaaacgaagtactgagacatgctgccatgtggagggaccgtaacttatgctaagtgaaagaagccagtcacaaaggaccacgtatcattatgactccatttatataaaatgcccagaacaggcaaatctacagagatgaaaagtagggcccggcacggtggcgcacacctgtaatcccggcactttgggaggccgaggcgagcggatcacctgaggtcgggagttggagaccagcctgaccaacatggagaaaccccatctctactaaaaatacaaaattagccaggcatggtggtgcatgcctataatcccactacttgggaggctgaggcaggagactccttgaacctgggaggcagaggttgccgtgagccgagatcacaccattgcactccagcctgggcaacaagagcgaaactccgtctcgaaaaaaaaaaaaaaaaaacaaaaaaaaaaacctgagtatggtgatggatgcacaactctgaacatactaaaaccaactgaactgtatgctttaaatggatgaatcatgtagtacatcagttttacctcaacatggctattaaacaccagcacagtggctcccacctgtaaaatcctagcactttgggaggctgaggcaggcttaagtctggagtttgagacgagcctgggcaacatagtgagatctggtctccacaaaaaatgttttttaattagccaggagtcgttgcgtgtgcctgaagtcccagctactcaggaggccgaaatggcagaatcacctgagctcaagaaattgaagctatgatggtgccactgcagtccagcccagtgacagagcaagaccctagctcttaaaaaaaaaaaaaaaaagcatttacaaaagcctccaaaaaaatacttaaccaagggggtgaagggcttgtatactacaaaacattgtttaaagaaattagagatctacataaatgcaaaaacatcctgtgtgcatggattagaagacaatattgttaagatggcaatactacccaaagcaatatacagattcaatgcaatccctatcaaaattccaacaggctttttcttttttcagaaatagaaaagccaatcctcacattcacatggaatttcaaagggccccaaagagccaaaataatattgaaaaagaaaaataaagttaaatactttccaatttcaaaatttactatacaaagctatagtaatcaaaacagtacagtttatacaggacagacatacagaccaatggaagagaattcagagccaaaaaataaacccaaatatctacattcaactgattttcaacacagatgccaagatcattcaatggggaaagaacagtttcttcaacaaagagactatattttttcaaaacgaaagaaaagaaacctagaagaaaaaatatccttacaattttttttgttaatttaaatactgttccttgcagagcagggaacagtgacccataggcaatgtgcccagagtagcctatcctcacaatcttatccctattttgcagatgaagaaactgaggcaactggatatccacattcaaaagaatggatatcacattcttttgtgatatcctacttcacactgtaaaccatatacaaaaataaactcaaaatgaattgacctgaatataagagctaaaactacaaaaaaagtctaagaatacatgagtaaatctcattactttgaatttggcaatgaattcttagatgacaccaaatgcacaagcaacaaaaagaaaaacttcaagtgaactcatcaaaattaaaaacctttgtgcatgaaaggacactgtcaagaaagtaaaaagataacctacagaatgggtggaaatacttggaaatctaataagggtctattaaccagaacacataaagaactcttacaatgcaacaacaaaaagacaaactgcctgattttaaaatgagcaaaggactcaaagagatattcctccaaagatacacaaatggtcaacagaaagatgaaaagatgttcagcatcattagtcatctggcaaacataaatcaaaatcacgatgaaggccgggcgcggtagctcacacctgtaatcccagcactttgggaggtcgaggcaggcggatcacttgaggtcaggagttcaaaaccagcctggccaacatgatcaaaccccatctctactaaaaatacaaaaattagccgggcgtggtggcacatgcctatagtcccagtgcttgggaggctgaggcctgagaatcatgtgaacccaggaggtggaggttacagtgagctgagatcgtgccactgcactccagcatgggagacagagcaagactctgtctcaaaaaaacaaaacaaaacaaaaacaaaaaaatccacacacacaatgaggtacaactttacatgcccaaggatggctgtaatgaaaaaaaaacaagtgttggcaaggatataaactgacaccctcatgcactgctggtgggaatgtaaaatggtgcagctgcttcttcaaaaagttaaatatagaatatatcaccccgaggccgggcttggtggctcacgcctgtaatcccagcactttgggaggccgaggtgggcggatcccaaggtcaagagataaagaccatcctggccaatatggtgaaaccccatctctactaaaaatataaaaattagccaggcatggtggcgcacacctgtagtcccagctactcaggaggctgaggcaggagaatcacttgaacccaggaggcggaggctgcagtgagccgagatcacgccactgcactccagcctggtgacagagtgagattccatctcaaaaaaaaaaaaaaaaaaaaaaaaaaaaagaatatatcatcccaatgtccatcaacaaattaacagataacaaaatgtgatacatctacaacatagagattattcatccataagaaggaacgacatattgatatacgctactacatagaggaacctcaaaaacattaagcttagccaagtgtggtggcacctgcctgtagtcccagctactctggaggctgaggcaggaggatcacttgagaccaggaggttgaggctgcagtgagccatgagccaaggtcccaccactgcactgcagcctgggcgatagcccaagaccctgactcaaaacaaaaaatcatgttgctaagttaaagaagccagtcacaaaaggccacatatgattccatttacatgaaatgtccagagtaggtaaattcatagagacagaaagtaaactggtggttagcagacaccaggagacagggggtgctatgaattgaattgtcccccaaagttcatgtgttggaaacttgatccccaatgcagcctcatgggaggtatttgggtgaagggagcaccaccctcatgaatggattaatgacattatcacagagtgggttccttataaaaggacgagttcggccaggcgcaatggctcacgcctgtaatcccagcactttgggaggccaaggcaggtggatcacctgaggtcaggagttcaagaccagcctggccaacatggtgaaaccccatctctactaataatacaaaaattagccaagcatggtggcacacgcctgtaatcccagctactcaggaggctgaagcaggagaattccttgaaccaaggaggcagaggttgcagtgagccgagatcgcgccacggcactccagcctgggcgacagagcaagactccatctcaaaaaaaaaaaaaaacaagacaagttcagccctgtcttgttctctcttacccttcccctttcaccatgggacgtgtgacaagaagatgccaaccctgaatctcggacttccctacctccagaacggtaagaaataagtttctgttcattataaattacccagtctcgggtaatatgttatagcagcacagaatgaactaagacataggatacaaaaactgactgcttaatgggtacaaagttttattttggggtaatgaaaaggttttgaaactagatagaggtagtggttacacaacattgtgatatactaaaggccaatgaatcatacacttcaaaatggttaatctcacgttatgtaaatttcatccccgtttttttttttttaaaggataaaaactaaaaaaaacctcatctgtgttactggaggttaggagagcggtaactgcttgggaggagcacttgggagagcttccggggaccgtcttattctatttcttgaactgtacactgggattggggcgagtttattatccaggcatttatctgtggcctttcatactttggtaacaagctaagaaaagaaacctaaaagctgaacgcagtggctcacaactgtaatcccagcactttgggaggccaagacaggagactcacttgaggctaggagttcaagacccacctgggcaatatagcaagaccatatatctatgaaaaaaaaaaaaagacaaaaaacaggtagaaggaaaaatatcctcacaattgtattcctattttgcggatggggaaactgagtcacagagaggtcctattagtttgcccaaccttcccagctgttacctgggagagccagaattggaaagcacagcccacatcttgactactataccgtctgcctctaaaccggcagatggagcccagcatggggcgtggcagagggcaggtgctctgctaatggtggtgtgctgcagctgtgtcagaagtgggaccagcacatggcatgagtgactctgattagatgtgctattactacacccttggccttaagcacagcttgctgggtgagaggcagcacgtgggccaggccttgagagcactagttcaggagtcagagggcctgagtccaacctcagctctacccactccttgctgaaacctcaagcaagtcactcttcctactgaaccttagctttccagtctgtaaggtggcatgtgctccacagggcatctataaaaattcaacaaaatcaggcttgcctagagcagagacaggtgtctggcacacagtaagtgctcagtaaaccagcactgccattattttaaccaccaagggggtcggtggggtggtacaggtcccaaaacagcagtagtcagcagggcccacctcaccttgcccacctctgccagctgctactcagaaagatgggcactgggaaggcccaagagtgcaggtgtgcacaagcgtgtgtgtagggtgcaaacctgagacaggtgtgtcagagctaggccatcccagatgacagaggcaggcctgtggctgggtcatctggccccttgtaacatgaatgcggacactgaaggcccaagaggggccaagactcatttaatgccatcagtaatcctagaccagagagaaactcttgcccctccaacagttccacacccatcccaaggctctcacagtccagcctaatgagccatggcctccgcacgtgcaggccacgggacaggagcccatgaccctgtgttccccagcacaccacccacacaccacgccaaccattcattcaacaaccatttactgagtgcctactgtatgcccaccacttttagacgtgctggggataccactgtgaagaagcctcatgaaaatgcctacccttgtagagctgacaacatcagagatctggcttgttaacccactttatagatgtgaaaccaaggctcagtgaggtgacatggcttgctcacagttgcactaagaggaagcagcagaaccagggttagaaccttgatagctgccaagactcaggaagctccatcaacaaacccagactccaggctcaggctgggggactgggccaagggaccttaaaagccatctctgtccagaaagagcagcaggacacgaatctcctctgctcagtcaggtggggaggctgctcccagggaggggcgtccatccctcatcgctgctccctgtctgcgtctgcaggctggtacagtgcaggatgcgtggctcttcccgatgcctgcagcgccagcttcctgccccctctttgaacaagcccacttaccccctcaggactcattggctgtcgcctctggcataactgtgaggctcaatccccgatttccttcaggcctttattcagatgcccccttctcagcgaagccccctctggccgccctgcctgcctcatgccctcccatcctcacgttgcttgttttttctccatggctcgcgccaccgtgagacatgcatgtctgcctgggagctgtctgcctccctgtcagcgcccaagatactaacacgaggatgggatgtttgcctgtcgggctcactgctggaccccaggacctagaacagcgcctggcccacaggcgctgctcagcacgtgtttgctgaatgaatgcaagtgcacacagggcagccaaccgccacacctggggaccttctttccagggggaggcccacagaagctggcctgggacaaagccatctctcagcaggtggcgcttctccccatctgcctcccagtcttgcgtggcagccactttgggacaaacagccctggggtcaaaaagggtctcttccctgtcctaacttcactaaaaggggacctcagcttcccactagtacaaatggatcaggccacgcatcggctcacgacatcacagggctgctctcgtctggagtgccaaagccaaggtccttttccatgacctgcaggcgcgacacagctggactccgcgttgctcctctgcttgcctcccccagctcgccctagctcacactgctccagccacgctgttaccagaaaacaccaggcacatccccacctgggagcctctgtccttgctgtccctctccctgggacacccttgcccagccagcgtctcacctcctccaggctccaggcctctgaccactgccgtctcctccgggcagcctcttgatgcccccccgcccccagcccattgtccctcactcacagttcccacttttcaccccagcacttgccaccccgacattccatgtctacttatttactgcctgccccacccccactggaatgtaagctccatcaggggaccactgtgtctcggagcccggggctatccggcacagcacacagtcaatgaatacttgctaactgaatgaatgctgaatactgcctcactgtgttagttcagtgacgtgacttcccctctctgggcctcagtttcttcatctataaaatggggctatgaatgagatcactcatgcacagtcagatccctgctctcctgcccagatgaccactgaaggagtccacgaaatgggggcataagcagctgtgggcctggggctgcggaatgctggctcctcaggctggtaagaccctccgcctctgcctctcagggcacagctttccaggaggagccagcgtgggagaaagaatctggcgggcaaaagcggcctcttaccacgcttgtggagccagccttctttgatgacagacacctcattcatggtggcagcgtggtacgctgtcacctagctcgggacagctcagggcagcaggacatgcaggaggcaccgtggacagggcacagtctgcaagacaagagaggagctggtcagggcgggaggggattccacaccagccccttccctgaggacgccgggctctgaggccctctggctgttctgcccactcagcaaagggtaaggccagcaagggtggcgtggagcccgctctcaaggacccattctgagcagagagatgtggcaatgtccccagcgaccccaatctgggggaagcagagctccccggcctaagcgcaggccagaccccaaactcaggacacccatgctggggggaggtggcccctccacccacagtcactcctgactgagcaagcatcaaggtagccgtgccctgccctccccgtgtcattcccatggcccaacactgaggtaacccagtatgaatgaggcagcccagggtacctgagggaatgcgcagagccaccagcatctgcctgtccctccaccatcttacacacacacactcttttctctctctcccctctcccttctttccaaaccaggaagccaccaacctgccaccttcaacaaactaagcacactcccgtccccccatgccatcccatgccattccctgagcctcagcggcctccctccccccatcagatgacagagaaaagacaggtctcagacaatccgggatcttgaacaagaaagcaacctactgcgtatgcacggtctggggcctagaagccagtcctgggggcttgaccgaggccctgatccctaccccaagaccttcacttctgtcctcagggaccagcaaccaacagactgagggacgccgaggccactgcttcgtctcaggttcccagaacggaggggaggagggcgcgaggcagcgccagctgggcccctacctggagcctggggcctggccagggtccacagagaccaaggcgcctttgcctttcccagcctggggttatttgcggacagcaggtcgggagctacggtggcgcccagagaagtggcagctggctctagggacaccatgggcatcagctttctctcgtgccccaggggagctggtgggccggacacgctactgcctggcatgtgacagtggcaggctgcccaggtcccggcagaaagaagggaggtaagtggtaggaagcgggaggaaagacaagatggacatgacagggaagtaaacaagagggtgagaaatcacattctgggctccaagctgcaaaggcaatgatgcgaggctgggagcagcaataaggggctccccttgccagcaacatgcccggcaccccacaacccaagcacacaggactgccagactctcaatcctcagcatccccacatctcggccgggcacaatggctcatgtctgtaatcccaacactttgggaggtcaaagcaggagaatcccttgagcctaggagtttgagacctgcctgggcaacgtagtgagaacttgtctcacgacctaatttttttctacaaaaaaattaaaaattaaaaaattagccaggcatggtgctgtgcacctgtaatgtcagctattcgagacaggaggatcactcgagcctgggaggtccaggctgcagtgagccttgattgcaccactgcactccagcttaggtgacagaatgagaccctgtctcaaaaaatatataaatatgtatgtatttctgtatctcccactgttctgtgtgtcaacctctaacgtgaccatctctccccatcctgcccgcggcctggctctagtcaggtctgcccccatctgcccccacctcttccccgagttcctacgctccactcttgctccctcccactcaccccacattcagcagctagagggatccccaacgctgaacctgtctttctcctgctcagaacctttgtggctccctggtgttcccagcaaaaaagccaaactcctcagctgaggatccaaggcccttcaggacctcgcctctgctgccctgcgttccaggtgcatgagctgagacgtgcacctagaaagccctcgggaaaggctaaggaccatgacgttgactattgcacctctccagcctctccgccctacctgactctccatgttatgcttctgtcactcaagcccttccctctggcctccatcagggacagcacctccttctgggcgttcttctctctcttccttgaggtctcagctaaaccagtgcctcctccaggaagccttccccacctcagaggctgcactgtgtgctctttgtgcaccctcggagcaaccctcccaacacctattaacgctaatgcagtagaccagcaaagcgtcttatctaatgagcacatgaagaaagaggccaagtgtccccaactgacccccaccccaggaccacacacagccagggacacactaccagactctcttcatgacaccaatcttttttggggtgcatcctagaccccggatggtaccagcaacagaatgtcactaagacacagccctgccttcatgaggctcacagtctggtgtgaggggcagaaaaatacacgaatatgcaaataatcaggtggtggggaggctggagagtggaagaacaggatgttagcttggtgtgcgggacttgcgagcagacacccgagttaactgagggagtgagctgtgtaacacatgaggaaatgtatttcagcaggggaacagaaaatgcaaggacctgaggcaggagggggcctggtgaggagaaacacgagagaggtggacaggggagaacaccaagggccttctgggctatggctgggactgagagaagcccgtcccctacacggacctacaccacaccttccctgatgcaagctcagttcaaaatacttcccaaatggctgggagggagaactcagagtccaaaggaggggctgatgtggagggaatagaacaggggctccatgtctcatctcccctctcgctggcccacagcggcccagggacatcgcctctcagggcccttgtaatgcagcagcactaaagtacccactgtgggcccagggctcggcctactgcctggcgcccagtgaacagccaaacacatggctgccattattccagagagaagcaaaggcagccaggtatggccaagagtggtctgggttccagagtccaagagccaccgccagctgggtggccttgggcagggtgccggcgctcccatggagtctctcctgaatgctcccaacaccccaccagacagtcagtgaccatgcccagatgaggacagaagctgagagaagggaagctgtttacctcgggtctcccagccgagaagcagcggaggccctggccgctgctgggatcaacagagctgctttttacaagctcatctcagcaactaaggagtcagcacagctggagggagagcagggggaggagttggaagatcccctgcgtcccgcctggatcctgccctgtcctcccactgagggtggtgcctcagctgaggtgtccgtgacgcagtcctgtggtgatgaaataccagccactgcagccaagaagatggctggcttaggccgggcacggtggctcacgcctgtaatcccagcactttgggaggctgaggtgggcggatcacctgaggtcgggagttcgagaccagcctgaccaatatggagaaatcttgtctccactgaaaacagaaaattagctgggcgtggtggcacatgctacttgggaggctgaggcaggagaatcgcttgaacccgggaggtggaggttgtggagagccaagatcgcgccattgcactccagcctgggcaacaagagcgaaactacatctcaaaaaaaaaagatggcctgatcactcggggggctgccaatggaggacactcaggcagggggacagagactcgcctatggaacccccatagcacgccctgcggaggggagtccctgcacggccccaccacactcattacttcctaaggttcctgggcatgagtcttctgagtgcctgggccagagctgcagctgttgactcaagacaaggtaaaaagagcaagagcacctcacaggagaggacacccacacaaccaagaaacatacataatctcattagttacaggcaaatgcaaatcataaccacctacctgggatggctcgaattttaaaaactgacaaggccaactgctggctcggatgtagaggaaccagaacccttactcattattggtgggaggtgcaaaatggttcaactactgtggaaaactgttaagcagtcaaaatcaaagctcaatatatgcctatcccacgacctagcaattcgtctcaaggaaattagtgtatgtacaaaagacttgtactacaatgttgacagcagcaatattcacagtaaccccaaactggtaacagaccaggagtctacccacaagagaatgaataaacaaacacgtagatccacagtagaacactactcagcaacgaaaaggactaaactgctgctgaatacagcagggaaggagtgagagaatgttatagagtgaaagaagtcagcactctgcccacgcccctcctgcagcctggagccccgtgaccacctgagtcagctcccaccccttctccgctcgaaccctcccatgcaacataaaagccaaaatccccaaagcagccccaggaccctacgcggcctgcaacatccccctttgcttctctgagggcacttcacttcagcagtgcctggctccctcagctgccaggatacatggggacgccccacctcagggccttgcaggcactgcaccctcaggtggaaactcaggcccctctccactctcttcagcctctgctcacgtccctttcttgagaagccttcctaacctccctaggcaaagcatgcccaccctacctccccttacccttacccttcattttcccctaagcacccatcaccaccgatgttactgtatgtgtttgcttacgctgacagcccaccacccacactggaatgtcagcacgacaaaggcaggactcttggctgccttagccacagctggatccccagagctttgtagggtgttgggcacagagtggagtgggtacttaataagtatctgtggaatgaacatgtacagagtgaagccctgtgcccagaacaggctcaaaataagctcaattcctttccttgccacttactaagtcctttttctctcgccccctctcactgacctgattttgatgccagacagcacagatgggctagggaggcaggtggggaagcagagatctgcgtctcttggagctggagctggtgggtggggctccttcctggtgctgcggaggctcattggggaggtggcagcgaccccctcaggagcctctgtcgcctgcactcagatctgtgcctttccacagcgcccggaggaagacttgctcaggagataaattcaaagacaacaggaagctggacgtggtggctcacgcgtgtaatcccagcactttggaaggctgaggcaagaggatctcttaagaccaggagttcaagaccagccttggtaacatagcaagaccttatctctacaaaaaatataaaaattagccaggtgtggtggtgcacacctgtagtcccagctacttgggaggctgagccaggaggattgcttgagcccaggaggttgaggctgcagtgagctatgactacaccaccacactccagcctgggagacagagcaaaactgtgtctcaaaaaacagacaaacaaacaaacaaacaaacaaacaaaaaaagctggccgggcacggtggctcacacctgtaatctcagcactttgggaagccaaggcaagaggatcctctgaacccaggagtttgagaccagcctgagcaacatggtgaaaccctgtgtctgccaaaaaaaaaaaaaacatacgtacatacatacatacatatatatatatatacacacatatatatgtatatatacacgtatatatacatatatatatatatagtagtcaggtgtggtggtgtgcacctgtagtttcaggtacctgggaggctgaggtgggaggttgacctgagcctgggaggtagaggttgcagtgagctgagattgtgccactgcactccagcctgggtgacaaagccagaccctgtctcaaaaaaaaaaaaaaaaaaaccaaaaaacccaaagacaacaggaactagtggtgtaacaggcagcatctgctcatgggaactcaggagaaaggcacctggggcaagacgtgagggaaccaactccctcatctgccaccagccattcaccactctataaactggtcccagcgtcttgtgagaacattctggtaaaactcataaagtggaaaatgtacatgtgcttggaggaatttctcctgcagaaaatgctagtgccagggcacagaagttctaagctgggaattctcagcctcaacactagtgacatttggggatagagaatccctgatgtggggactcttctgcaccctgaagaggtctggcagcatcctgggtctctactcactaaagccaacagaacaccttcccctggttacgacaatcaaacatgtcttcagtcatcaccaaatgtctcctggggtacaaaaccaccaccagctgacaaccgctgtcctaagtatgtactgctgaaatagggaaacctggcaacaatctaaaagctcacaacaggggtctggtgctatatattggttaatatcatgactctactaaaaagagcaaggctcacatagcccataccacgtgccaggcccatttgagtgcttcgcacataccaatataaccctcacagcaacactttgaggcagacactcctactgtttctatgacaatgaggaaactgaggcacagaagtgaaatgacttgccctatgacttcatctcaggaagtacaggcggcctggctcccccacaacaccatgccacacagccttgagagttaggcagatctggactggggtccttgtttgcccactttctagactcccaagcctccgtttcctcctgtccttgcaaggacagacagcagcgctttcatcacaggctaatgcagggaagggctcagcacagcacccagcacgtggagacggtctggccacacaacacaacaagccatcctgagcacagaaacacagaaaccagccctgctgtgctgacactgggaccatcagcattcgctaacgaaggctcgcggcacgacagaatgcaggcgggatgccttttctgaaacgcacacacacacgccctgtcacctcaattctacaatatgcgtattgtttcacatgctgatgtcattgagattggcatgtaccttgcaatccatggacaaaactcacctatcgcattcttttcagaaaagcagttatatgatcaatgatggaccttatagggcatactgtcttagacttcagggcacggggaggtatgtgtttaaatgtcacacgcacagaaaaaagaaatccgaaggaaatacgccacactaagaggcaggagagtgggtgcgggaggcaaggcagcctcaggaaccaaatgccagcttttcagccctggctgtgtcacctgctgtgagaccttgggcaagtcaccaagtcatgttccctttcttcacctctgtttcctcatctgtatattagagataataactgcatatacctatctctaaggctattggagggttcagtgagttaatccacatgaagtcctcccaaaagagcctgtaagagcaactgctcaacacgtatcaaatattatcatcactggccaggcgcggtggctcatgactgtaatcccagcactttgggaggccgaggcgggcaaatcacaaggtcaggaggtcgagaccagcctggccaatatggtgaaactctgtctctactaaaaattcaaaaattagccgggctggtggcaggcacctgtaattccagctactcaggaggctgaggcaggagaattgcttggacccgggaggcagaggttggagtaagcagagattgcaccactgcactccagcctgagggacagagcaagactccatctcaaaaaaaaaaaaaaaattattatttcctctgatgggtggagacatgggaaacttcactttctatactgtatgtttctgaacaggtgaatttttacctattctacctccttggtgagaaggtggcactgaagaaacttttttttttttttcctgaaaaggtctgggtacttcaaaaaaaaaaaagagagagactttttgtttcttttttcttttaaacacactccctacactcgccccatctgtctgcttggagcaggtggggctggaggcaggttgaagccgtgggcaggctgcaaaagaaacggggacaagaataagcacagagcagattccttctcctccctgccaccccacacacacaccttccccctcacgccacccagggccttacagcacccacagaaatcatgtcaaatattctagtctgcttggccacgggctccatacactctgagggctccatgctgcaaccagcgggatcctccacgcagttctgaccctgtccctcccctgctcaggacctctccctagtgcccatggatcacgtccaaggcccctatggaggctgccaggggccatctgccttggccccgcctgctctccagcctcactggtctgctcgctccaacacacaatctccccttctcctggccccatgaagactccctgctctcacaccccaagacctttgcacatgctgtaccccttgcctggcactctgttcacccatcttcttcacggaggccttccctgaccacccctctcccacgagcagcggactctcagagctcagccttcccttcccctcacagcacttgcctctgtcacctgcatgactatgtgggtaatgtcgcctctcccactggactgtgggttccacaaggcagggatacagtctgtcctagcccccactgtgtccccagctccactcagcacagggatgggcccataactttcattacttcaggggggagtggtgaacagaaccacagcatttgtgccaagtgaaggtaaaacaaaaaatcctgcattcattcattccacaaatatcacaacaactctgcatcatcactgctcgggtcaccagggattcagcagtgaccaaaacagaactccctgccattggggagttgggggaatgagggaacaggcagcaaaataaaaaataaatacatacgcaaattagacaggatagccaaagctaacaaatgccatggagaaaaggagcacacggaagattcagtgcagggaaagggagcaggggtttccgactatacacaggatggtgacagaagggcgcactgaggcagcgcagtctgagcaaaaccggaagcaggtgagagagccgggggagacctggggaggaacgctgcaggcaggggaggagcagggctgaggcgcgttcgaggcgcctacaggagtgggtgaaggggagggccgggagatgtagctagaggaagctggggaccgctgggcagggccttgggggccactgtcagcattgtggctcttatttggagtgagaggggaactatccgcctgaggcgagctggggagtgggggaggggcagcaggtggaaccccttgcacccagggcagggcaggagtccttagggaggcagcccttcctctccaggagctgtccccagaataagccctgggcactggcctgatgggctcaccacctgcctcacttgagaaccatgaggacctgcatgcagcagatgtgaaaaccgaggatgggagagattcggtgaatacccacagcgagagacagcagggacacagccaaggagcccggacccctctcctccgagccctgagctgcctccacctccttctgcctttgctcccaagagacagggccacctcccatcttgtgtcgcctcctcccacaccccggccagcccttccttaccgcccctgatgtgcacgcatgcacgggagccctccagttggactgcatggggaatccctgacccacgtcgctctgcatcgccaccacctccctgggagctccagggcagggcccagtggcaaaaggagaaaccagtgggtctgcatcaaggctaatactcagtgagcactcacaaagcaccaggcatggattaatgttcatcttcacagccagcctgtgttactatccccgttcctcacatgggaaaactgaggcccagggagagagccacatgcacacagtcacagcgagtaggtgcaggagagggaccgcaaccagagcagaactagcccacagacctttccataacgacagaaatgtggttactaaatgtttgaatgatggctagtgcaactaaagaactgactttttacttttctttaattgtaattaattaaaacttaaaaagccatatgtgagtccgggcacgatgactcacgcctgtaatcccagcactttgggaggctggggggggggggggtgggcggggggcgatcacaaggtcaggagttcaagaccagcctggccaagatggtgaaaccctgtctctactaaaaatacaaaaattagccaggcgtggtggtaggcgcctgtaatcccagctactcgggaggctgaggcagagaatcgcttgaacccgggaggcggcggttgtagtgagacaagatcacaccactgcactccagcctgggtgacagagcaagactccgtctcaaaaaaaaaaaaaaaagtccatacatggctagtagctaccattctggagtgcaattctatagaattcctgctaattaagcaccgggagcttaaaggcaggaggcagggatgtgactctcacaggcccaagaggagccagatcatcccagtgcggctggaagctcccatgctataccccatctctcccgcaccccaacgcagcttacctggggaattggagcaggactcaggcccaaactcacacctctagtcaactcaaatcctgactctaccacttccaggctacacaggtcacttctctgaacctcagcttccgcatctgtaaaatggaatctttttttttttttttttttttttttttttttttttttttgagacagagtctcactctgtcgccaggctggagtgcagtagtgcgatcttggctcactgcaacctctgcttcccaggttcaagcaattctcctgtctcaacctcccgaatagctaggattataggcacccaccaccacacctggctaatttttgtatttttagtacagacagggtttcaccatcttggccaggctggtactgaactcctgacctcgtgatccaccctcctcggcctcccaaagtgctgggattacaggtgtgaaccaccgtgcccagcctgtagaatggaatcttaacaccaatctgcccaagcacatgtttatgttatctcaaaagataatttttgcaggccaggtgcagtgattcacgcctgtaatcccagcactttgggaggctgagggatgtggatcactggagcccaaaagttcaagatcagcctgagcaaaatagggagactcccatctctactgaaaattgttttaaaaaaattagccaggtatgatggtgcatgcctgtagtcccagctactcagaaggctgaggtgggaggaccacttgagccagtgaggtcaaggctgcaatcagccatgatggtgccactgcattccagcctgggtgacagagccagaccctgtctcaaaaaaataatgaaaaatttaaaaagatgatttttctgataaccatgggttgtcctggggacccaatgagatggcttcacacacagctggggacagggccagtgcttgaaaaataggtggcaattacataaaggactctgacatcaggggccgtcctgagcctgtcagagccatgcagtggcagctaatgttactgctgtcactacttggttctaaaggaatcatcccaataatttccaacatgcccctactaactttttgaaaatatcatctaaatgaaaacacacagctaaaaagagtcaatgccctgcagacacctcctcccacccgccaaggccttcggacaccagtttgagaagctgggctctagggcgccctgtctccaaagcagaatatggtctgctttctccatccctggctgccacctgaatccagccagctctctcccacacaggtccctccccacccacctgtgtcccttctctttggggataaagccctggatccccatcatagcccaggccctgagccctgccaccctgctctctccccctcacccactcccccggctccagctacatgggcctgctgttccaccagcacatccagatatcgccttccttgcggcctttacctggctgcaccccgtccagcccacttcctcgggctctcacatcacaggggctcctcagcagccttcccaagcccctctcccacccagtccagctagatctctgttccctccttcagccacaccaagcactcacaggccaatgcaacctctctgccacctccgatcgcatccagaactacacgtggcacatagaagtgattcaatcaatatttggagacagatggaacacacaaatgaccaagaacagccaaaggctggctcctgaggctgttcagcaatcaggcccctagggcagtggggagggggtgcctcccatcctcatctcttccccctgggccccccttgggaggggccaaggtcatggtattgggggtggagagaagcagccacaccccacatcccaagcaggcatggaatggagtcatttctggattactgaggcctactttgtgccagctctgtctaggagaagagaaagcagaaaagaaatcatgatgacaacagtgacaactccagtcatagcaggcagggcaagaagatgaggctgtcttcaaaaggcagcttcgccgacagagcagggttcaaccatcatgcctattactgacttccagcaaatccaataacctctctatgcccgtttcctcccctgtacaacggggacgatcgggacagcgagctgccaggctgtggtgaggatgagtgagagcagacaccttaagctctgcagcagtgcccagcactgagaggcgaactactcacgagaatgaccccaatattctatgtggcttcctgggcctcagtttcctatctacgagatgggagtgctaacactgcccacctcccaggctgctgtgcaggtttgtagagctaatatgcagcgtctggttgggcaggagtacagtggtgggagtgattcacattcctgtctggagccctcccatcagctaacaggccctaccactctctcccaaggaccaacaacgagcctgtgcccactgccctgcagagccccttctgtgctctcaggtgccctcagtcctgtctggcaatcaccaggagtagcatcagcccaaattcatcccgccgcctcctcaggaggcctgtgctttccaacgcagcagctccgtgcatcctccccaccgccccactcagcaggaaggttcccgtttacagctgagcaaaatgcaccttagggagaagaaataaggccccagagctccacagccaccgagaggggtgccaagagcagggttctcacccacgtcagctacccccgggaccaggtcactcagcagccccagctgggtaagtgtacaccaaaaacccaccagaccatgaagaacttgaagccaggctggagaagagaaccggggagcggcaactgccccagcccattcggaaagggcccacaaagtggcaaaccgaggaagacttgggtttctggcctcacccttagaaacaacatctgcgaacgagcttctccagcaggacggctgggctgaagaaactcctgctgggacctctgacatgcagtctcctcttggccgacccggcttgctgtccctcgctcggcacagtcagagcacctgggccctgctgtgggtgccgagttggcagtgggtcctgccccaagggggccaggctgagctcccacccagcgcccctcccacactcactccctccctcctggtcctgctcccaggctgtctcccccagctgggcctctcgctgcttggctggctgtccagaagagcctgccatggaaccaccccaccgtgcggcccggaggcctgtggttgagggccttccgctgagagctctgggaagctgaagagaggcccggggaggggtgaccctgggtcctccaggggcttggagctcaagtctgaaagacactcctttccatcccaacccatcccgggggccttctggagaccctagtggtttgttctgaggggttctgctccttctaggaagataccctggaacacacctcaaaaaaaaaaaaaaaagccagagcgcctgctcccgcaccaagccttaggggtgagcccatgggtgggatcagaagtcacactcaccaggggctactgagctgtggtgggggaatctctggaagcccagattcatagcctgtccccaacacttcctggttgggggactcagcacaagctacagaggctctccaggcttcagttctcaccacttgtaaagcgggaatcagagaagattcctcctgggtctaatgggtcttcacccagatcctcccatggctccctcacagcactccagtccctacccacacgtcacctcctcagggaggtcctccctgatcacccagctatagtggagaaacatgcccacactctcaacctggccctcatttattttgccttcgtaatatcaaccacacctgagcccaaccagagacctgggtgctgggcgccagtcacaagccctggtctttccaattccagaggagcactgggaatggcgcaggcctacaggcccacggcagcgtggacgcagggtcagcgggtgctgtctgtatcaggtgtgactgctgccctgcgttgctattcagtattagtccggctggttgggttggggaggaatgggcagagaaatcagcccaatgagcctcccctcctctttccctaaaagtaacagccacgggctctggagaacacggtgtgaaaaccacaggagggaggcaaccctcaggcctttgctggctgtaaggcagtgatgctactggaggggaagtgggaggcctgtgaaacgccctgctccgctcagtcaaatctacccacgcccccaggcaggagcctgtgaccggctcctgggtcacctgctaacaccctgaatctgaccaggctgttcctgctgaaattccaaactccttcacagacagtccacaaggctcccagtgaaagggccctgcctgccccgcagccccaggactcatctcctccctgctccctcgctctgccaagccacacaggcctccgtgaggcttgtccctgcacctcaccaagctctgtcctcccttcagacctttgcactgtggttccctccacctggagggctgttccttctcctcccatcccacatgactgcctcaccttgccaaactgggatcagctcagaggccctccccacagccgcatgcatctaaagaagtgcccagtctgtcacctgatttgaattcgctgcctagctcctccccctctaaccggctccttgcttattaacctgtttcgggttggtcttgcttagccccacaaggatagggactttggcaagtacactgctgtattcccagtactgatgcaacgctggcacatacgaggtgttcagtaaatggtggcggatgagtgaaaccttttcctcggctccacaatacccttaggatccatcctcacctctcacccaggcccacaggccagtgcagcacagcccctgccaacccctgcaggcacttctgctgctccccctgcccaggcccagccttcctgccactcccagagctgtgagctgtggtgggctgggaaccaggggcagtggcatgcacctacggtcccagctactcaggagactgaggcaggaggatcacttgagcccaggagttcaagactagcctgagcaacatagcgagactcccgtttccacaaaaaatttaaaaattagctaggcatggtggcatgcacctgtagtcccagctactcaagaggatgaggtggaaggatcactaaagcctaggaggtcaagcctgcagtgagctgtgatcacaccactgcactccagcctgggtgacagagggaggccctgtctcaaaagaaaaaaaaaaacaagcacagagcctgacctctgaaaagactccagtgtgtctaccttggaggcgctcagggctgcaaagccactgcgtggaagaggagtgggcccgggagctgcccttgtcagttctgacttgattgcatgtctcccccgacctctgtttctgcatctgtaaaactgagatgctaatttcagccctgatctcctcctagtgctctctgacacggttctgtgaactggcaaaggccttcaaagtcccggcagaaatactaagaattacaattgctaagacagaccaacagctcaccatgtgtcgggcactgttcttagtgaggagacatttccggtaggcttattgtatgccagaacagttatgaatgcttcccacaaattaatccactcagccttcacaataatcctatcaggtgggaattatcatcatccccatggcaccgatgatgaaatgagctcacaagggttggggagcctgctcaaggtcacacagccatggagtggcacggctggatttgaaccctgtgctctcactcgcttccatacacctctttacagaggctggaaaccagaacattgaagttctggatcctagctgggccaggctggggagctggatcccggaatgctcgaggggaccaaaagtagggggtgggggaggctggatgcctccgttccataacataatcatgactgccaaccaagacttacacagtaccaggcaccattctaggagcttctcgtggattaattcatttaatcctcacaacagcccaaggtggacgtccttctgagaccactgtatgggagtgaacagtgtggtccaaggtcgcagagctagaaccgacttcaccgtcctgctgctagctaacgcaggtccctggtagctgtgtcaccccctgcatggctctcttgctgtcttcttctcccagcacacacctgcccagggttaaaggatgccttgcctccactctgaggagggaccaagaaatgctggactggctgtaggcagagatgctcagggcagcctgaggctcaggggtaagaggaaggaaagacataggacagtcacctctataggtagaggacagaggacagaggtgactctatcctatgtctttccttcctttcacccagcctggaacctggtgagcaaggaatgcatggcactaggggctcagtgacctgggttcaaatcctaccctggcacccatagggtctgataagatgcggtggaaggcaattcttcctctgaacttcaatttcggactctgcaaaaaaggacacaaataccatataaagcccaaagcacagggctgggcagagtatatgctcacagacaaaagccactcctccagtttctccttgacaagacgatctgaggccaaggttggccaagggctcacatcacacctctcccacttcagctatgagacctctgggaaatctttgcacttcacagtgagtgaaatgattcctcatctgtaaaatggtatcacacttctaactagctcgtagctctccataaaataggcctaaccacaggtatgttttgagacttaagtgagatcacatgtacaaaagccctgtcacacgcctggcatggggtgaatgctataaacactgggcatccactagctctggaaatgatctgcctctctgagatgctgttttctcatctaaaagggagagcataacaacagcgcctaccgctctagaattcaagtattcagcaagtttatctatatgaagcattccaaacagtgtgtggcccacagaatgcactcagttactgtcagccatcaatttcatgattactgttttcactgccactgttagccccatcaggcaaaccctctaaaagctggcaggagaggaccagaggaacaaacccctagtggagaaagattctacagagtcgccgctgcctcacagactgtgggacctttctctccaggaaccacgagccacggaagccagtcagcttggaagtcactgctgcggactaggggcaaccatctgccccctctgaccacatcaccagcccaggtctgctgggtcaatcagggactgcagccagtcctctgggaactccagacccagagcaaaggctacagggcaagccaaggtcatgatctggcctagggagcagggacactggccacagacctctggggctggctgctcccagcaccagcccacagaccacaataagacaccagatccatgggggatctgactgtcccaagcccttcagagcagccttcctccctgggccaggctgggccaggggcacccccactccaagtccccttggcctatgcaaagaggaacagctgggaaaacagctcccggcctcactgcaaggccaactgttactgccttggtggggagtgtaaacatgatgtgtgaccgagctggtaactgggagacacaaacagcttcgtggccagcgacagaggagcatgtagtggtctgcgttggttcctggacccttcacatccactgccaaccaagttcagcccacgagtgaactcctgctgcttctctgggaaggtaggagtggatgaagttgaaaagcagcccattggaggctctagttactccagcccaggcgtcttgctgagccccaagaggtctccaaatgagaggaagaggtcctcacaatcccaagatcaagatgcccccagagagcttccctggggggaagaggtgttcccccaaacactccttcctcccaagttttaacaagcgggtgcaggggcacggctcctcaaatccaagcccaatccctcttcctcttcagaatgttaaggctcagacaacttcagtgacttctaacacagctttcctccctcccctatggaaggaaagaactgttactgcctggtaaataatctgagagggtaatggaatccagagcagcacctccatggtccaaagcaccccagtaaccatgacgttccctccagagtcgttaagaagttcaataaaggctgagatcagtgtaaacccccaacgccacacacgtcaaatacaggaaacagaaacccctcctcaccaatcggcatcacagtcctcccaaaatacgcccctaaaacccactagggcctgtcccgccccgtcccagtcccttaaagatcacaaacatcacagtcctctgatttgggttcccctacgttctaagcagggctcccccaacgccgtggtgatataacccagccacagttggggaagcatcctccccagaagcccccacccctgtaaatacagcacagcaacggcttccacagcgccaaaaaggtacagccctctacacttgatgcggcgcgccccctcgatagcttagcccgcgcacgccaggctcgatctgcccgccgcgcccgaaaggtccagcccccggcccgcgcacgctgcggcctgcgctccccgtcccgcaaacttgcagcgctccccccaccgcctcagtggtatggcccgccgccaccgccccggccccccgaggctggtcccaccgcccccgctcggccacccccactcagctcctgaaggaggggctcgagggccgcggtccccccgccgggcacgggtggtacagcccatcgcggcaccgcggggggcccggacgcgaccatcgtggggggggcgttcggggacacgcgctggcgcactcacctgtcaccggcagccgcccagcctctccggcggggctctacccccgcccatcgccacgctgcgctggttccctttccttgtgtttcccggcagcggcaacggcgccggcagcggcagcggcggcggcgacgcctcctccgaggcaggcccaacggctagcacggcgcggccccccccgccccctccccccagcccccgcttaccgccccctcccaccctctggacggaaataccgccctctcgcgccacaaacaggaagtgacgtacaaagagccagagacgaactctgagagagcgagagcgcaagagcagggcagagaaggaggcgggctcacagcagggcgcctgcgcacattagacaactttgggcctgtgtgggttagagatgggcctcgctaggccgtggggcggaaaggcgagatggggctacgcaggcgcactaggactccgacgtctgctttccctagggcctagccgtagtgattatttcccggcagcccctagtccgtatttacatacgctttgatcttgttttactcagttctgggttctgacgctcttaaaggaccccggagcgggagttagttaggaggggtttccttttcagtgtgctcgtcatggttgagctcaggctctgaagccacacaaccccagacttgaatttcctcctttctggtgactgtgggcagaaggcttgaccgttttctgtgcctcagtatccacatctgctaaatggaaacaatcatcgctgtgtcgctggcttttgaaccattttaatgtaaacaaaacggtttttaccaattagttcattactgcaagatattaatgccacctgctctcatcgtacatattccagtgaatctgggatataacattttataatgcaacttgggcccataaaggccttaaaatcaccctgcggccgggcgcggtggctcactcctgtaatcctagcacttggggaggccaaggcagacggatcatgaggtcaggagttcgagacagcctggccaacatagtgaaaccccgtctctactcaaaatacaaaaaaaaaaaaaaaagccgggcatgtcggtgtgtgcctgtaatcccaactacttgggaggcttgaggcaggagaatcgcgtgaacccgggaggcagaggtttcagtgagccgagatcatgccattgcactccggcccgggcgacagtgcaagtctccgtctcaaaaaaaaaaaaaaaaaagaaaagaaagaaaaaagaaaaaaaatgaccctgcaagaaaagagctttgcacagatcctaatccgtatattagctagtatactggacagctgtgagacatctggctcccagcccctcctctctcataggggattgtgctgcctcctgaatttgggttccagtatgccatataacttggcaattgtatgcattggtaagtgagaaaaatgcctgactgagagttgaatcctgggtccacctcagtctgtgagagtgtttcaggcaaatcctgctgagggttcggctttcgttttctgagacgtaaacctaatgctggaactagccctttcttatttggtttctagcttggaacttgctgcttggtattcctaattcccggtcttccccatcagtcggtgttaataactctgaccaatgcctcccccttcacagccctaaccattttcatctattactgtctggtgacaggtctgtttcccccactgcacaggaaacacagtaaaggaagagaccaagactgtctcagagatcagtgtgtatccaacattgcccagagtgggctcttgcagaatgtttgtttcaagcattagcccttctgccctaatctagactcaaggttactgtgaccaaccctcttcactcctgtccacactgaacagctcacaggccattcccctacgtctaagtctcccctgggccaacttgaatcctagcccctcctagggcacttaattatgacacactgagatctcactgaaaccacccatgtgcttgtgtataaactccttgcagcactggtagtcaagggcagtggctttctctttttttttttttttttttttgagactcactgcatcgccaggctggagtgcagtggcgagatcttggctcactgcaacctctgccctctgcctcccaggttcaagcgattctcctgcctcggcctcctgagtagctgggattacaggcacgcgccaacacgcccagctaatttttttgtatttttagtagagagggggtttcaccatgttggccaggatagtctccatctcttgacctcgtgatccacctgccttggcctcccaaagtgccgggataacaggtgtgagccactgcacccggctctttctggttttggttttttattgtttttttgagacagggtttcaccccctccgtcaccgaggttgaaatgcagtggcacaatctcagttcactgcaaccgacacctcccatgctcaagcgatcctcccacttcggcctcccaagtactgggaccacagatgtgcgccactatgcccagctaatttttttgtatttttggtagagacggagtttcgccatgttgcccagactggtctcagactcctgagctgaggcgatccacccaccttagcctcccaaagaactgggattagagatgtgagccaccgcacttggcctaatattctttttttttttttttttttttgacacagtctcactctgtctcccaggctggagtgcagtggtgccatccgccatctcggctcactgaaacctccgcctcctaggttcaagtgattctcctgcctcagcctcctgagtagagggattacaggcgtgcaccaccacacctggctaatttttgtatttttatttatttatttatttttgagtctgagttttgttcttgttgcccaggctggagtacaatagcacgatctcggctcaccacaacctccgcctcctgggttcaagcgattctcctgcctcagcctcccaagtagctggtattacaggcatgcaccaccacgcctggctaattttgtatttttagtagagatggtgtttctccatgttggtcaggctggtctcgaactcctgacctcaggtgatctgcccaccttggcctctcaaagtgctgggattacagacatgagccaccacgcccagcccttaatatactatttatttcaattccgcaaccctgctgaactgattttctggttgtgccttgtagtttgtaaaacattagtctaggaggtaaacaacactttttagcattgatgatgagtaggcccaggttctaatcgtatcttttctgtgtccttgtcaaagtcacttcacttctctgagcttgcctttctttattctattaagacagtaataatataatttatttagcaattgttacaggccaagttctgtgtaaacacactcccactgatgctatcctgttgctatctacacagtaaccctggaggttaaatgtaacagcacattaagggccttgcttgagttcccaggacaagttaaggacaaagacagtatttgaacccagacagtttgataccagagcctgtgctcttaactcaactcatgctagaaaatggaaaagtattggccctacttttgtgccctatgttacttctgcaaatggcttagttatctttggggggcctcaaaggccatcctgggcaacatagcgagactctttctctattttcagcatcaagggtgaaacttgagggccactttgaatcttgtggcagggcaacacagcgagaccctttccatttcagcatcaagggtgatcgatcgaggcgactgggcatggtggctcacacctgtaatcccagcactttgggaggcagaggcaggtggatcacctgaggtcaggagttcgagaacagcctggccaacatggtgagaccccatttctactaaaaatacaaaaatttagccgggcgtggtggcaggcgcctataatcccagccacttgggagactgaggcaggagaattccttgaacccgggaggtggaggttgcagtgagcggaggtggcaccattgcactccagccttgtcaacaagagcaaaactctatctcaaaaaaaaaaaaaaaagaaagaaaaaaagtgtgaaccagaagaaaattccctacaacctcaccccattttcttccatcttaatctagtctataaactctctccccataactataagtatggactgcacatgcactttgctgggtagagggggccggtaacttattgaaagctgttcaaaggtctcttgattcagaaaaaagaaaacgatgagggatcttgccccaagggttggagaggacatctcctcaaagcccccttctgtgcccagggagtagaaatcaggcccaggagtccattccaaggcttctcacagaggagtctccttatcgatggcaactggacaagctgtggggactagtcacaaaataatttttttttttgagatggagtctctctcagtcaccaggctggagtgcagtggtgcgatctcggctcactgcaacctccacctcctgggttcaagtgattcttctgcctcagcctcccgagtagctgggattactggcacccacaaccatgcccggctgatttttgtatttttagtagagacaaggtttcaccatgttagccaggatggtctcaatctcctgacctcgtgatccgcccacctcagcctcccaaagtgctgggattataggcgtgagccaccgtacccggccccatttttattttttatttaaaatattaggctggacacagtgtctcacacctgtaatcccagcactttgggaggccgaggcaggaggatcacttgaggccaggagttagagaccagcctggccaacatggcgaaaccccgtctctactaaaaatacaaaaattagcccgggaggtggcaggcacctgtaatcccagctactgggaggcggaggcatgagaatcacttgaacccaggaggcagaggttgcagtgagccgagactgtgccactgcactccagcctgggtgacagagcgagactctagctcaaaaaataaataaataaataaataaataaataaataaaatatttaaaagagtttcccacattataaagaaatgccaaaatcatgtatttgattcccgagccagaatctacaaagcccactccccactgcctcccccagatactaccgtgttgggaagatcctttcagagtaatgttattaatatatttggcagaagtacatataagcatcagggattccgcaaatgttggttccaatttccttttttaaaatttgtttctttttcaaaaattgtaatggaagacacagtgcacattcaattttctaatatatcggagattctcgaaacgtttaagtccaggtgcagcatctcaagcctgtaatcccagcactttgggaggccaagacaaggagatcactcaaacttaaaacttcaagaccagcctggataacatgacaaaaccccttctctaccaaaaaatacaaaaaaaaaaaaaaaattagtcgggtgcagtcgcacacacccatggtcccaactactcaaacaaaacaacaaatatttaagtggtcatgctaggctagtatactttgtgtagaccttgggatgaagctttctctgctcttttttctttctttcttttctttttcttttactttttttttttttttttttgagatggagtctcactcccgtcgcgcaggctggactgcggtggtgcgatctcagctcactgcaacctccacctccagggttcaagtgattctccttcctcagcctcccaagtggctgggattgcaggcgcccaccaccaccccaagctaatttttgtatttttagtagaggtggggttttgccatgttgtccaggctggttttgaactcctggtctcaggtgatccacccgcttcggcctcccaaagtactaggattacagacatgagccaccaagcccagcctcttttttatttattattttactactattttgagacagagtctcactctgtcttccaggctggaatgcagtggtgtgaacacactcactgcagccttgacctcctgggctcaagcaatcctcccacctcagactccagagtagttgggaccacaagcgcacaccactacgcccagctaatttttttttttttttttttgagatggagtttcgcttttgttgcccaggctggagtgcaatggtgtgatctcggctcactgcatcctccacctccaccacctgagttcaagcgattctcttgcctcagcctcccgagtagctgggattacaggcatgtgccaccatgcccggctaattttgtatttttagtggagatggggtttctccatgttggtcaggctggtcttgaactcctgaactcaggtgatccacccgcctcggcttcccaaagtcctgggattacaggcgtgggccactgcacccggcctgcccagctaatttttaaattttttagagatggggggggtctcaccatgttgcccaggctggtcttgaactcctggcctcaagcagtcctcctgcctcagcctcccaaagtgctggaattacaggcatgagccaccacacccagacttttctcctctcaataagatcaaacacctttatcaatctgcttccaacacatagatggcttccaatcccatgtggaatataaaccaaaggcctcaccgtggccttcatggctgtatatgatctgtccctgcctgtttctctaacttcatcacaaactactcttgtccctggcccatgttccagacacacatacctcctctctgcccctacaaaaagacaagcatttgggaacttgctgtctcctctggctggactcttcatgtccttgatcctgatcttggcatgactggctccttctttcttttctttcacaactctgttcaaatctcacctccgggtgcagtggctcatgcccataatcccagcactttgggaggccgaggcagctgggtcacctgaggtcaggagttccagaccagcccggccaacatggtgaaatcctgtctctacaaaaaaaaatacaaaaattagctaggcataatggtggctgcctgtaatcccagctacttgggaggctgaagtgggagaatcgcttcaacccgggaggcagaggttgcactgagctgaaatggtgccactgcattccagcctgggcaacagagcaagactccgtctcaaaaaagaaagaaacaaacaaaaaacccaaatctcacctccttgtgcactccgagtctaaaagggccatgctgtcactatgtttgtaagcatatttgaatcctctacctaggacttaacactaaaatatttttgttgtttattttgtgtcctcccccaagccagaatatacatttgctcatgaggacaaggactactgggtaccgctgtattcccagcccatggaagaatgcctgtgaaagagttcaggacacaccaccccaatatatgcccatttgatatgctgattacttcaaacagagggaactcaggggaacagtaagtgcagggactttctctgaccttcccttacctgtctgcacacggatcctccaaaaggaactccattgtcatgaatcccctccccaggaatcttctcaatcagagaagatgagctcagatcacaggagaggagaccggaggttgacgtgatgcccagactgtcacctattcttccgggaaaacttttcttaactaatagacaatctgcataacaacttttattcaccatacacctcctccctgcaccctcccataacttatgtcaccaccacctcccaaaagccccaagcccctcttcttttctgcaggtcaggatgctatatgataagcttcaatcctctgacacttctttaaatctcatattttgtgggactctcacgtctaagtatgtaattttttttttttttctcgagatggagtctcactctgttgcccaggctggagtgcagtggtgcgatctcggctcactgcaacctctgcctcccaggttcaagcaattctcctgcctcagccttccaagtagctgggattacaggtgcccaccatgccaccacgcctggccaatttttatatttttagtagagatggggtttcactattttgcccaggctagtctcaaactcctgacctcaagtgatccgcccgcctcagcctcccaaagtgctgggattacaggcatgagccaccgtgcccagcaattttttgctactttttgtttgtttttgttttgtttctgagacagagtcttgctctgttgcccaggctggagtgcaatgatgcgatcttggctcactgcaacctccgcttcccgggttcaagcgattctcctgcctcagcctcctgagtagctgggattacaggcaagtgccaccacaccaggctaatttttctatttttagtagagacggggtttcaccatgttgatgaggctggtctcaagctcctgacctcatgatctgcctgcctcggcctcccaaagtgctgggattacaggtgtgagtcaccatgctcggccttttgctactgttaatctgccttatattggtttaatgtgtaagccagccaaagaacttagaagcatagcaggaggggccgggcgcagcggctcatgcctataatcctagcattttgggaggccaaggcgggcagatcacgaggtcaggagttagtagaccagcctgattaacatggtaaaaccccgtctctattaaaaatacaaaaattagcaaagcatggtggcacatgcctgtaattccagctacttaagaggctgaggcaggagaatcgcttgaacctgtgaggcggaggttgcagtgtactgagatggcgccactgcactccagcctgggcgacagagcaataatccgtctccaaaaaaaacgggtagcgggaagccatttttcactcccttcgagtttctggtgcccaacgtggggcatctttcactttttactctaggactgcttcagcagcaggctcctgacatgcctgaccaaacactggccacagataagatttcctaccacattagccccccagatctctgcctgtagagtccagcggaagcaagataggtaagggtctctttgtctttttcccttttctaagtttggattagcaggagaaaatgtgtgcgaactagttcttgtataataactctggtttttttgtttggttatttttttttttggtggtgaggggaggtattattgttttctgattcctcccctcccagagatggtcattattttcccatgtctgtgtcttttgtgttgtgtcatacagaagagaatcatagggcaagaacacaggcctcaaagactggtgagttcacagttctctgcaaaccaatgtctgttcagactaattttgctgtgggtccccaagacaaaaaccagatgaggtgctccttgggtcttgttttatgtcctcagagcttggcttttccatcagtgagaacactctggcctctgccagctgagggtgcaagtgtcagcctgtgtcagccagccagtcaaataggctggaagcccacgatgcagtgacaagcggcattctctttgtccactcgtgccagctctcaggagagtttggtcccaataactgtcccagtccgtagggctttgttgtctcaaccttcaattggacaatgctaggaaagtccaatcccagtagtgcttgcccggtgtcacagattagcgggtcagtgagtgtcatgagacaccatttacacaaacactatccttaatgcctgtggcaacaaaggtctttgctttctttttttcttttttgagacggagtctcgccctgtcgcccaggctggagtgcagtggcttaatctcgcctcactgcaacctccgcctcctgggttcaaatgattctcctgcctcagcctcccaagtagctgggattacaggtgcctgctaccacgcccagctaatttttgtatttttagtagagacagggttttaccatgttggccaggctggtcttgaactcctcacctcgtgatccgcctgcctcagcctcccaaagtgctgggatgacaggcgtgagccaccgtgcccggcctaaacagctgtcttattggtacctatggaaagatcaagaagaaaagaggacagaaagggatataacagctagtcttagagactcctctaacaagattaaaaagcagaaatcagattactttttttgtttgtttgagactgagtctcactctgtcgcccaggctggagtgcaataacgtggtctcagctcactgcaacctccacctcccaggttcaagcgattctccctgcctcagcctcctgagtagctgacattacaggcgcccaccaccatacccggataatttttgtatttttagtagagatgaggtttcaccatgttggtcaggctggtctcaaactcctgacctcaggtgatccgcccgcctcagcctcccaaagtgctgggattacatgcatgagccaccgtgcctggcctagattatttatttacgtatttatttattgagacagggtctcgctctgtcacccaggctggagcgcagcgtcgcaatcaccactcactgcagcctctgcctcctggactcaagtgatcctcccacctcaacctcccgagtaggtgggactacaggcatgtgccaccactcctggctaatatttttagttttgtagagacagggtcttgccatgttgcccaggctgctcttaaactcctggtctcaagtgatcctcctgccctggcctcccaaagtgctgggattacaggcatgaaccaacatgcctggcccactcatgtaaattaaatacagtcacgtgtcacttaatgatgagaatatgttctgagaaattccttcattaggcaattttgtcattgtgtgaacatcagaaagtgtatttacgcaaagctagatcatatagcctactatatacctaggctataagttatagtctattgctataaacttgtactgcatgttattgtactgaatactgaaggcaattgtaacacaatgctgtttgtttgtttgtttttatttttttgagaccaagttttgctctgtcgcccaggctggagtgagtggcaccatcttggctcactgcgacctctgcctcctggattcaagcaattatcctgcctcagcatcccgagtagctgggattacaggtgcacaccaccatgcctggctaattttttgtatttttagtagagatggggtttcgccacattgaccaggctggtctcgaactcctgacctcaagcaatctgcctgcctcggcctcccaaaatgctaggatcacaggcatgagccattgtgcctggccaagtgttcgtatatctaaacatagaaaaggtacaataaaagataaaagtgggccaggcgcagtggctcacacctgtaatcccagcacttcgggaggctgagacaggtgaatcacctgaggtcaggagttcaagaccagcctggccaacatggtgaaaccccatctctactaaaaatacaaaaattagctgggcgtggtggcgggcatctgtaatcccagctacttgggaggctaaggcaagagaattgcttgaacccaggaggcagaggttgcagtgagctgagatcgcaccattgtactccagcctgggcaacagagcaagaccctgtctcaaaaaaaaaaagataaaagtggtgcacttgtagagggcatctccattataaccttatgagaccaccattatctatgtggtgcattgctcattaaacatcattatgcaggagatgactgtatgcctaaaactgctagaaatataggaagtaatccaaatgcttttcaagttcacatgacttgggtacatctttggtaaataaaactagtttaatattgttggtttaatgaaaatcagctctgtcttctgacttacaaaaaaaattaaaacaaaaacaaaacccaaaaaccttatacatggatttcacttatggtccttgcttagatgatggctgcctgacatgcatttgatgtaaaaatggtgaatagtggggacaggcacagtggctcatgcctgtaatcccagcactttgggaggccaaggtgggcagattagttgaagtcaggagtacaggaccagcctggccaacatagtgaaacccagtctctactaaaaatacaaaaaagttagccgggcgtggtggctcacgcctgtaatcccaacaccttgggaggccgaggtgagtggatcacaaggtcaggagttcaagatcagcctggccaagatggtgaaaacctgtctttactaaaaatacaaaaattagctgggcatggtggcgggcatctgtaatcccagctactctggaggctgaggcagagaattgcttgaacccaggaagcggaggttgtagtgaggcgagattgcaccactgcactccagcctgggcaacagagcgagactccgtctcggaaaaaaaaaaaaaaaaaaaaaaattagctgggcgtggtggcgggcacctgtactcccagctactcagaaggctgaggcaggagaatcgcttgaacctgagaggcggaggttgcagtgagctgagatcgtgccactgcattccaggccgagcgacagaggtgactccgtctcaaaaaaaaaaaaaaaatagccgggtttggtggtgcacacctgtaatcccagctactcgggaggctgaggcaggagaaagaatggcttgaacccagaggcagaggctgcagtgagccgagatagagtcactacactccagcttgggtgacagagtgacactctgtctcaaaaaaaaaaaaaagaatggtgactagggaaatgacttgggagagctgactttgtctaatgtctcatgaaacttccatgactaatctaagcataattgttaagaacatgtgaaataaataaatgtaagtaggatcaaagttgataaatgaacttttcaacaacaatcgtgctttatgctttaacccaggaggcggaggttgcagtgagctgagatcatgccattgctctccagcctgggctataagagtgaaacattgtctcaaaaaaaaaaaaaaaaaagaaaaaataattgtggtttataaatagctctttaaaacggtttcccaacctcactgataacaacacccttggatggcagatattaattaaatatccaggtcatttccaaataaaacaaaatactaaagcattcattgctgaacacagacacaagtttatttacctttggcttcttaaaatttatagaaagaaataatatatttgggtccataggtaaacatgtcctgtttcatactgaaaaactattctgcgagaaaacacgtttctagaaattatgtgtcttcacaaaatgttagctcatgacagttcaaaatcgcttacttcctaggtttcgctgtagagttgctaagacttaaaattctcatatataattatataactactataagtgactctgtatgcaaagtgtacaaggaaagtaagatgttagtgaggtatgaagatgtgggggggttttgttgaggaaaaataacttagtctagtttataagttgttgcagaataaaggaaggaagaaaagatacaggtaaaactgaatgcatataaaagttggaaagagagaatcttttgtggtcaaactgaccaaaattgagtgaatttattatgtcttaaaaatgagagtgaatttattatgtcttaaaaatgagccctaatatcaagggtacattgatgcaaaactagaatttggcattatcttttaaaatgcaagattttcttgtagtattgataaaaaagagtgaaagattttctttttcaccttttaagtaatctgccttaaaaaattatgtcttatcaaaataattttctctttcatgttatcttttatcaggccttcaattactttccaagaaaataaaatcctattaagagagctaatatatatatttttacaactatataactttatttgccttcaaagccttttaataattaccctggtgattatgaaatgaatattaataaatattaaatgctcattaaatacttaaatcataaaatattaaatgattataaaatgaacagttgattaaataggatcccagatcactatataattcaataatcactctggtaaccagactaattattagtgacctaaattaatagttacctgagatcctattaatcaaatttttccttttttcttttcttaatttcaaaaaatatggaaggcctcatgaatttgtgagttatccttgcacaggggccatgctaatcttctctgcatcattccaactttagtatatgtgctgccaaagcaagcactcatcaagtgttttaaatctttttttacatttttgacaaacttcctaaaatcaaattctaaattcagtcttttgaccttgaattaactttggaatttgccagttgagcccctgggaaagctcaaaagatgtgtttctcacctcgaaaaagagagacattagccaggcacggtggctcacgtctgtaatcccagtactttgggaggccgaggcaggtggatcacctgaagtcaggagtttaagaccagcctggccgacatggcgaaaccctgtctctactaaaaatacaaaaaaaattagtcaggcgtggtgacgggcacctataatcccagctactcgggaggctgaggcaggagaatcgcttgaacccagggggcggaggttgcagagagccgagatcgcaccattgcactccagcctgggtaacagagcgaaactccatctgaaaaaagagagatattagactaattaggcttatttgaaatgttaaattaaatgggaaacattgtcaaataataaatgatgctaaacgtttatatttatgaacccagggtaggaggtgatgagggtgataaaaaacatttttttaaataagttatatggccgggtgcaatggctcgtgcttgtaatcccagcactttgggaggccagggcaggtggatcacgaggtcaggagttcaagaccagcctagccaacacaatgaaaccccgtctctactaaaaatacaaaaattagctgggtgtggtggcaggcacctgtaatcccagctacttgggagggtgaggcaggagaattgcttgaacccaggaggcggaggttgcagtgagccaagatcgcaccactgcattccagcctgggcgacacagctagacaccatctcaaaaaaaaaaaagttatatttctggatatgttactgatatgaatgttctaaaaattatgagattcctagaaatctaatgttataagtcataattttgttactatgttaacatgatatatgccacagaaataaccaggtttccttgtcaattgctggttataatgaactctcatcagattttttaaccatggccattctgtcttgctcatcaatagtgttttggttcttctctaaaagcatttgcaatcagctattgccccaaattgcttcttcaagattcatggaaatgactctgacaagtagtctggaatagaaggtcctaataaacttatgattataacattggactgggtaagaatttccaaaactctagtggaaaaactggactcagaaaactgctgactcgactaggtgtggtggctcatgcctgtaatactagcactttgagaggcccaggcaggcggttcatttaaggccagaagctcgagaccagcctggccaacatagagaatcccgatctctactaaaaatacaaacaaaacaaaaaaattagttgagtgtggtggtgcacacctgtaatcccagctactccagaggctgaggcacgagaatcgcttgagcccgggaggtggaggttacactgaaccgaggcactccagcctgggtaacagagcgagactctgtctcagaaaataaaaagaaaaagaaaccctgctaacaacatcaggaagaataagaattacatgggactgagctgacagattataatttttttttaatacctacagtattatagtgccataggcatagtttgatggcaagtccctggcttcataaccttgagaggcttttatttatttatttatttatttatttatttatttatttattcttgagacagagtctcgctctgtcgcccaggctggagtgcagtggcatgatcttggctcactgcaacctccgcctcccaggttcaagagattcttcctgcctcagcctcccgagtagctgggattacaggaacccaccaccatgcccagctaatttttgtatttttggtagagacgaggtttcgccatgttggtcaggctggtctcaaactcctgacctcgtgatccacctgcctcagcctcccaaagtgctgggattgcaggtgcgagccaccgcgcctggcctgagaagctttgcctggccaacatagagaaacccatctctactgaaaatacaaaaatttgctgggcatggtggcccacgcctgcagtcccagctacttgggaggctgaggcaggagaatcactccaacctgggaggtggaggttgcagtgagccaagatcactccactgcactccagcctgggtgacagagcaagactctgtctaggaaaaaaatcttaaaaaaaaaggtccaatctgggccaggcacagtggctcatgcctgtaatccgagcactttggaaggccgaggcaggtggatcacttgaggtcaggagttggaaaacagcctggtcaacatggagaaaccccatctctactaaaaatacaaaacattagccgggcatggtggtgggcacctgtaatcccagctactcaggaggctaaggcaggagaatcgcttgaacccgggaggcagaggttgcagtgagccaagaacgtgccactgcactccagcctaggcgacagaacaagactccatctccaaaaagcaaaaaaaagaatctttacaatcaatcattattcttactgctcttacataaataatcaggccaagtttaataagagaccaaccttattttgcaacaaattgatatttttttccttgaaacagggtcttgctctattacccaggctggagtacagtggtaggatcacggctcactgcagcctccaccccccaggctcagatgatccttctgaggtcagcctcctgagtagttgggactacaggcatgcacgaacatgtctaatttttttgtatttcgtgtgccaccacgtctgatttttttgtattttttatagagatggggttttgccatgttgcccaggctggtctcctagactaaagcaatctgcttctgcctcgactcccaaagtgctgggattacaggcatgagccaccactcctggcaacaaattgatctcattgtgattgtgtctggcagaaatgggggtgactgtacaaagaaaaatcatgtttcagaagaaaactatagtgtatccattattagattctagttcattgttgtggagggtttgttatttacctggaaacttgagtggatcctgaattcttccagtttcctcaaatgtctggctatgactctccaaactaacatttccagtctttctcccttctgacttggagttactgaaagtaagacttcctttcctgaagccctgcaagctaaaactagaagacttgatagagacttcagataaatcaccacaaacacttaggtatacaccaccttcatgcctaccaatatacaaactaatcagaaagttcactgggatcacacctataatcccagcattttggaaggccggggtgggaagaccacctgaggtcaggagttcaaggccagcctgggcaacgtggtgaaaccccatacaaaaattagccgggcggggtggcgggtgcctgtaatcccagctacttgggagtctgaggcaggagaatcgcttgaacctgggaggcggaggctgcagtgagccaagattgtgccattgcactccagcctgggcaacaagaacaaaactccatctaaaaaaaaaaaacaggccaggcgcagtagctcacacctgtaatcccagcactttgggaggccgaggtggggggatcacgaggtcagaagatcgagaccatcctggctaacacggtgaaaccccatctctactaaaaatacaaaaaattagttgggcatggtggtgggcacctgtagtcccagctacttgggaggctgaggcaggagaatggcgtgaacccaggaggcggagcttgcagtgagcggagatcataccactgactccagcctgggcaacagagcgagactctcaaaaaaaaaaaggccggcacagtggctcatgcctgtaatcccagcactttgggaggccgaggcaggtggatcacaaggtcatcgagaccatcctggctaacacggtaaaaccccgtctctactaaaaatacaaaaaattagccgggcgtggtggcatgcgcctgtagtcccagctactcaggaggctgaggcaggagaatcgcttgaacctggcagacagaggttgcaatgagccgagatcgcatcactgcacttcagcctgggcgacagaacgagactttgtctgaaaaaaaaaaaaaaaaaaaaaaaaaaagttcactggaacccctaatgcaaattgcaaccaggaaaatctgtgtcaaattatcactgcctgcccctactccaactgaaaatgctttgatccagcatctagaaatcatgtcaattggctgccctccaggctcagaaactagtttacagattgctgcaaacattaaccttattcttttgtttcctcttattaaatacctgtttgcttgtgccatacagaggcctgactgtgatggcagcccacctgccacaccacctcctggaatgagacagaactgattaattggactgacctagtcccaggtctcatactattcaaacactaatctgatttttctgtcatccaccaccaaatcaacttttagcatgtggaacttctagagaagtttcagataggagaaatgaagaagttcgagaaatgccatcccaaaatacatccctttgatagactgattacttcaaatggagggaacctggggaacagcaagggcagggaggactttctttgaccttcccttatctacctaaacacggatcctccaaaaggaacttcagtgtcacgaatcccctccccaggaatcttctcaatcaggaaagatgagctcagatcacaggagatgagactggaggttggcaccacgcccagatctattcttctgggacaacttttcttaactaagagacttataatctgcataacaagacaacttttattcaccatacacttcctccctgcaccctcccataatttaggtcaccaccacctcctagaagccgcaagcccctcttttttctgtagctcaggatgctatataagcttcaatcatctggcccttctttgaatctcatatattgtggggctcctgtgcatacttacttaattaaaatgagtttttttctactgttaatctgccttatgtcaatttaatatgtagcccagtcaaagaacctagaagggtacagggaagccattttttgctcccctacaccaggcacatagttgggacttggggatcaaaaaatatttgtttaccaaatgcagttttgattaggaaggttaaagctctgtactaggctgatttttattccaggtctgaacttgtctgtttaccgagttggccaggcacggtggctcatgcctgtcatcccagcactttggaaagctgaggtgggcggatcacttgaggccaggagtttgagaccagcctgctactaaaaatacaaaaaattaggccaggcgcggtggctcatgcctgtaatcccagcactttgggaggcaaaggagagcggatcacctgagatcaggagttcgacaccagcctggccaacatagcgaaatcccatttctaccaaaaatacaaaaattagccaggcgttgtggtgggcacctgtaatcccagctaatcaggaggctgagggaggagaatcgcttgaacctgggaggcagaggtttcagtgagctaagatcgtgccactgtactccagcctgggcgacacagtcagactctgtctcaaaaaaaaaaaaaaggtagatttgaaatagaaaaatccttacaacacagcctcccacattactaagaaaaactgaaataatataaacaccacctgatctttttcaagaagagaaaaatttcacagctgcccagtggatttataaactctattcacttgccacaagatggcgccacatgagctggtcatccctgcagaaacccagctatgtcttgcaggcatcaagtcttcctagagcaatttgcgggaccattatatttgaacattcactgtctaaaaggaagctcttacacgacacctaaatgcaacatgttaagtcaccagggtgtctcggaaaagataaataaataaatgtaacatgtgatcctgaattggattccaagccaggagaaaaaacagcaataaggaacgttattgggacaattgatgaaattggaacatgaattttgcattagataaaagtatcatgtccatgttaaatttcttgttttgatagttgtactgtgcttatgaaagagaatgttcggccagacatggtgacccacgcctggaatcccagcactttgggaggctgaggcaggtggatcacctgaggtcaggagttcaaagaccagccagcccaccatggtgaaaccccatctctactaaagaatacaaaaattagccggacgtggtggtgggcgcctgtaatcccagctactggggaagctgaggcaggagaatcgcttgaacccagatgaaggaggttgcagtgagccaagatcgcaccattgcactccagcctggacgacaagagcaaaactctgtctcaaaaaaaaaaaaaaaaaaaaaaaggaaagagaatgttcttgatcttaggaactacacacaagtgtcctgaggtaaagaaagacacatgatgttctccaacctaattctcaaatggctcataacacaatagatatagatgatgcatgtatccttatggaggggagaagagggaacagtaagacaaatggaacaaattgtaaacaattggcaaatctgggtaaagagtatacagaaatcctttgtactcttgttactttttttttttttctgagaccaagtctcactctgctgcccaggctggagcgcagtggcgagatctcggcttactgcaacctccgcctcccgggttcaggcgattctcctgcctcagcctcctgagtagctgggactacaggcacccaccatcacgcccagctgatttttgtatttttaatagagacgggatttcaccatgttggtcaggctggtcttgaactcctgacctcaggtgatctgccagcctcagcctcccaaagtgctgggattacaggtgtgagccactgcatcaggcttcttgttacttttctaaaagtttacaattatactaaaataaagcattaccaaaaaagttattttatagcctgtaagaatgtcattaaaatttttttttttttttttgagacagagtcttgctgttgcccaggctggagtgcagtggtgcgatctcggctcactgcaggctccgccccccggggttcacgccattctcctgcctcagcctcctgagtagctgggactacaggcgcccgccacctagcccggctaattttttgtatttttagtagagacggggtttcaccatgttagccaggatggtcttgatctcctgacctcgtgatccgcccgcctgggcctcccaaagtgttgggattacaggcgtgagccaccgcgcccggcccttttttttttttttttttttttttttgagacgaagtcctgctctgtcacaggctacagcgcagtggtgcaatcctggctcactgcaacctctgcctccccggttcaagtgattcttgtgcctcagcctcctgagtagctgggattacaggcgcatgccaccatgcccagctaacttttgtatttaagtagactctgtgtttcaccatgttggccagactggtctcgaactcttgttttgaagtgatccacccacctctgcctcccaaagtgctgggattacaggcatgagccaccatacccgagcaggtgtgtttgtttgttgtttggagacagggtctcgttctgtcacccagactggaatgcagtggcatgagctcggctcactgcaacctctgcctcctgggctcaagggatcctcttgccttagcctccctagtagccgccatacctggctaatttttgtattttttgtagagacagggttttgccttgttgcccaggctggtattgaactcctgagctcaagcaatccacctgcctctgtctcccacagtactgggattacaggaaatttcagagataaaattaggtatcaacactgtatgccaggtactgttttaagcctttcacactaatcgactcatttaatccccaaaaccattccatgggataggtgctattattactctcatcttggtttttttggttttgtggctttttttttttgagacagtgtcttgctctatcacccaggctggagtgcagtgatgcaattttggctcactgcaactccacctcccgggttcaagcaattctcctgcctcagcctcccaagtagctgggattacagtcacccgccaccacgcccggctaattattactctcatcttagtgaagaggaaactgaagagaggttgagtaacttgtggatcacacagctgtaggatcaagctcttcataataacacacaatcaagaaggtttaaggatggccaggatatgctctactgataattcaggaccaagtactctgtaaaatgtctggagggaggaaaggcaactttatttatttatttatttatttagaaacgaagtctcactctgtcgccaggctggagtgcagtgacacaatctcggctcacagcaacctctgcctcccaggttcaagcaattgtcctgcctcagcctccagagtagctgggattacaggcgcgtgtcaccacacccggctaattttctgtatttttagtagagatggggtttcaccatgttagccaggatggtctcgctctcctgacctggtgatctgcccgcctcagcctcccaaagcgctgggattacaggtgtgagccaccacgcccagccagaaagtcaacttttttttttttttttgagacagagtcttgctctgtcacccaggctgcagtgcagtggcgcaatcttggctcactgcaacctccacctcccaggttcaagcaattctcatgcctcagcctcccaaatagctgggattacaggcgtatgccactacacctgacaaatttttgtgtttttagtaaagacaagttttcgccatgttggccaggctggtctcaaactcctcacctcaagtgatccgcccgcctcagcctcccaaagtgttgggattacaggcgtgagccaccacgcccagaatagaacattttataagaatacacaacaaaagcacagtggctcaagcctgtaatcccagcactttgggaggccaaagcaggcagatcgcttgggcccaagagtttgagactagcctgggcaacatggccagaccctgtctctacaaaaaattaaaaaattagccgggcatgtgcctatagtcccagctacttgggaggttgaagcaagaggattacctgagcccaggaggtcaaggctgcagtaagctgtgatcatgccactgcactccagcctaggcagcacagtgagaccacgtttcaaataaacaaataaataaaagtggatattgaaaatgatcaggtttgtttgaagaaaattctgatttctcctccagtgataatggctagtaggttcagctacataatcagcagccactttatttctctctctcttttttttttttttttgagacacagtctcactctgtcacccaggctggtgtacagtggctcggtctcagctcactacaacctccaactcccaggttcaagcgattctcctgcttcagcctgagtagctgggattacaggcatgcgccaccactcctggctaatttttgtatttttagtagggacggggtttctccatgttggtcaggctggtttcgaacttctgacctcaggtgatctgccggcctcagcctcccaaagtgctgggattacaggcgggagccaccgtgcctcgcctatttctctcttttattttggttaaaccttgcataattcaggactgatttttgcatcatttgagtgtcaaattgaggcaggggctcagagcacttaaacctaaattcatcataggaaagttgtcccttgaagttgcctttcctccccacgaacattttacagagtacttgctcctgggtggcagagcgaccttatctcaaaaaaaaaaaaaagaatatgcaacaaaatatgcagttactttaaaaggagctttttccaataaggacactaaataaaatatgcttaacatcattagctatcaggaaatgcaaatcaacaccacagtaagatgccatttaacacccactaggacaactataatcaaaaagtcagatactagtaagtgttggtgaggatgtggagaaaatgggaccctcatatactgctggtggaaatgtaagatcatacagctgatggaaaacagtctggcagttcttcagatggttaaaaatagaattatcatatgacccaacaattctactgctagggtatatacccaagagaattgaaaacatatgtctacacagaatacttgtacctgaatattgatagcagcattattcacaatagcccaaaagtataaacaacccaaatgtccatcaactcatagataaacaaatgtaatacatccatacaatggaatattatttagccgataaaggaatgaaactctgatacatgcctggtgacagagtgagactccatctcaaaaaaaaaaaggaatacaggccagccacggtggctcacatgtataatcccagtgctttcagaggctgaggctggaggatcacttgagcacaggagttcaagaccagcctgggctggagtgcagtggcatgatctcaggttcaagcgattctcgtgcctcagcctcccaagtacctgggatcacaggcgtgtgccaccacaccccgctaatttttgtatctttagtagagatggagtttcaccatgttggccagggtagtctcgaactcctgacctgaggtgatccgcccacctccgccttccaaaagtgctgggattaaacatgtgagccaccgcacccagccgaattgttcactttaaatgagtgaattgtctgatacatgaattatatctcagtagagctgtttttctaaaagctctttatgtactaatataaaacaatctccaaggtatattaagtgaaaaaagcaaagtgtaaaactattagatatgtaaccatctgagtaagaaaatataattatgtttgtaaatatacagatatttctgggggaactcataaaactccagtaacactgactgcctctggagaggggaactggatgactgacggatccagagtagaagcagaattgttatttttaaaataagagatgcccaaaaatacataaaaattaacacaatgaataccatgtgcctaccgcccagttttaaaaaccattacaccaggcgcagtggctcacacctataatcccagcactttggaaggccgaggtgagcggattgcttgagtccaggacttcaagaccaacgtgggcaacatagcaagcccccttctctacaaaaaaacctgcaaaaattgggccgggtgcagtggctcacgactgcaatcccagcactttgggaggccgaggcgggcggatcacctgaggttgggagtttgagaccagcctgaccaacacggagaaaccccgtctctactaaaaatacaaaaaaattagccaggcatggtggcgcatgcctgtaatctcagctacttgggaggctgaggcaggagaatcgcttgaacccgggaggcacaggttgcggtgagccaaaatcacgccattgcactccagcctgggcaacaagagcaaaactcggtctcaaaaaaaaaaaaattagccaaacgtggtggcacgcacctgtagtcccagatactcaggaggctgaggtgggaggatcacttgaccctgagaggcggagagtgcagtgagttgagatcgcaccactgcagtctagcctgggcgacagagcaagaccctgtctcaaaaaataataataataaataaaaataaaaaataaacacaaggagccccactgtcttaccccacaccttgcgctttcacaggctcacacttccttcaggtggcggagtccctcacatgatgcagtgaagggagatgtggagtcttgctgggtcgcccaggctagaatgcagtggcacaatctcggctcactgcaatgtctgcctcctgggttcaagcgactctcctgcctcagcctcctgagcagctgggactacaggcctataccatcacgcctggctacatttttgtatttttagtagagacagggtttcaccatgttggccaggctggtctggaactcctgacctcaagtgatccacctgctttggcctcccaaagtgcagggattacaggtgtgagccaccatgcccggcccaatttgcttttttcactcagtgttttagtttattcatattgatatgtgcaacattagttcattttcattgatgtacactatcccacatccaatatgtaaaacataatgcatccaacactggtgtcttattttccaacatgaccacaatgcgagttctcatcccacatgctcttcttacaaggagatgttgacttcctcttactgagaagtgggatctatcatgcctcctcctgaatctgatgggccagtgactgtggcagaagtgaagccctgtggcttccaatgctaggttagaaaaggccatacagggctgggcatggtggctcacgcctgtaatcccagcactttgggaggccgaggcggtcggatcacgaggtcgagatcgagactatcctggccaatatggtgaaaccccatctctactaaaaatacaaaaaattagccaggcatggtggcgggcgcctgtagtcccagctacttgggaggctgaggcaggagaatggcgtgaacccaggaggcggagcttgcagtgagctgagatcgcaccactgcactccagcctgggcgacagagcgagactccatctcaaaaaaaaaaaagaaaaggccatacagtttcctctggctctcaagaagctccttcttgaaacccagctgccatgctgtaaggaagcacaggccacaggaagaagtcatgtgtaggcattctggctggcagcccaagctgggccccagataagtgccagtactggttaaccaccaggtatctgaggaagttttaagacgacaccaacctcagccaacatcttactaaaatcacatgagcgcccccaagtgataacagcctaattaagtccagtcaacccctgggactataagagataataaaatgattgttaatttaagccactaagttttggggtgattagtgatgcattaggtaactggaacaactatgccacaatctgtccattctccagttgctggatatttgtttccacatttatgctattacaaacagcactgctgtgaacattctcatacatgtcttttgcatgtacgtggaagtttctccagggtatatatttgctaggagagtaactgctgggttggaaagtgtgtcaccttcaactttaccacaacctaccaaactattttccaagatggttggtaccagcttacattccatcagcaaagtatatcctcccattactccaaatcttccctaacacttgagacttaaggtttttgccagtctactgggtgcacaatggtcttatttcatatccttttaaggactggaattttgtactgttcccatgaattaatccaaaataagtgcttaaacctatagtaatgttgcttttttaaattttttattttttcgagacaggggctcactctgttgcccaggctagagtgcagtgtcgtgatcacagctcactgcagcttctacctgttgcgctcaagtgatcctcctgcctcagccacccaagcagctgggactacagccatgcgccaccacgccgagctaatttttaaattttttgtagagatggagtttcaccatgttgcccagtctggtctggaactcctgggctgaagagatctgcctgccttggcctccccaagtgttgggattacaggcatgagccaccatgcccagcccgcttttcctttttaagaatgatttacacattggggttccatattaaggcttcattttctaaaagggagttgtcactgggtatgatggctcatgcctgtaattcctacaattacaggcaagaggcaggaggatcatctgagtccaggagttcaaggctgcagtaagctacgattgtgcctctgcaatctggcctgggtgacagagcaagatcctgtctccataatcccagctactcgggaggcagaggctgcagtgagattacaccactgcactctggcctgggcaacagagggagactctgtctcaaaaaaaaaaaaggtatagaaaaaaagaagggaggctccagtagcagccaagcacatctcatgcctagatcttggtttccaccactgttctgcaattaaaaggaccaggctccttggaaaaatggttggctccaggactggggcaggaaatattcaagatgagcctgcagcatctctagagcctgaaagtaaggacacagtaaaaacaaaaacaaggctgggtgcggtggttcacgcctataatcccagcactttgggaggctgaggcgggcagatcaactgaggtcagaagttcaagaccagcctgaacaatatgatgaaaccccatctctattaaaaatacaaaaattagccaggcatcgtggcatgtgcctgtaatcccagctactcaggaggctaaggcaggagatcacttgaactcaggaggcggaggttgtggtgagctgagattgcaccattgcactccagcctgggcaacaagaacgaaactccgtctcaaaaacaaaaacaatgggagtataacaagtcaaagggactctggaaccaactgaaagagctccccatggccaaagtcagactaatgtgagtgacaaaataaagaaagtaacgttggatgataacctcaaatacaaagtaaatatccctgagtccaaactcataaaaataaatgactaagttactaaatgaggagaagagacacatttcctttgcagaagaattccaaataatttatgtaaatcccttgcccccaaggagatggagcataaaccccccaactccttacatgcaggctgtgcagtgaattccttccaaagaggacaaggtgtaaagggagaaagaagagtagctttacaaagtggagaaacttgacaaacaggtgatcaggatgaacaaaaacagtggtgaatcatgtggtcagtgtgtccccttgatatgtgatgaaatgacacttcccctttgaggtcttcctccaaaaaacacgtaactccagtgtaatcatgagaaaaatatcagacaaatcccagctgaggggcatcccataatatgtctgaccagaactcttcgaaactatcaaagtaggcatcaaaaccaaagaaagtctgagcaactgccctagccaagaggaacctaaggagacacgacaactccttacttgtcaatataaatgtctggagccagaatgttatcaaatttgataacataatgtcatatgagatcctggaacagtaaaatacattaggcaaaactaaggcaatctgaataaactatagactttagttaatactaatggatcgatattatttcattaattgtgacaaacgtaccaccccaatgtcagatgtcattaatattaggagtaactgagcgtggggtatacagcagctctctgcactatcttctcaattttttctgcaactctaaaactattctaaggccaggtgtggtggctcatgcctgtaatcccaacattttgggaggctgaggtgagtacatcgcttgagctcaggaatctgagaccagctagggcaatatagtgagacctcgtctctacaagaaaaaaaacaactggccgggcatggtggctcacgcctgtaatcccagcactttgggaggccgaagtgagcaaatcgcctgaggtcaggaattcgagaccagcctggttaacacggtgaaaccccatatctactaaaaataaaaaattagccaggcatggtggcgcatgcctgtaatcccagccactcaggaggctgaggcaggagaattgcttgaacccggcagacgcaggctacagtgagccgagatcaccccactgcactccagcctgggcgagagagtgacactccatctcaaaaaaaaaaaaaaatttaaattaaaaaattagctgagcatggtggcaggtgcccgtagccccaggtactcaggaggctgaggcaataggatcacttgagcctggtaggtggaggctacagtgagctgggatcataccactgcactccagtctgggtgacagagcaagcccctatctataaatgaataaataaagctgttctaaaaataaagtctattacaaaaaaaaaaagagagagagagagagagatttagccctgattttgcaaagggaaatgtctcctctgctgcaggaccccgacaggccttcaaagttgggtctatagttgcagcacttgccaaactaactcaggtcagatgcccaaaggaggggtggaggtggctgcagctcaactcttggctcatctcagcagcagggggcttgggcactggagaaaggggggctgaggctggcccaggccttggccacttgccacagatactgctagtttgcatctggctttagtatccactgatgtgggctaccagaggaagggatgtgtccagaggtggccttgtctcagggcgaccatccacacagaatcactctgctgggctgctgcaggtctggttctgccattcagcatgagccctgggctcgctgcaccaccatctcctcatccgtttatgggatgagaataggaagaccctgccttttatgatgttgccctcaggattcgacaagtccaacaacttagccaagcgttgatttagtacttcctggcacacaggtggtagtcaacgttagctctcagcatcccctgacccaactcctccagcggtctccagctggaagagtccaactgctcttcattcctttatgaaatggggtggtcactgtgtaaataaatcacctgaaggatgccaatcatcttggaggagaggctagttcagatctgcaacggactcatcaccagtatttgcacttaaataatgtaatgtaataatgtgttcttcgaagtcacccctgaattgatcccatgtgtaaggaaaattgttcattctaggactacttgtaatagcacgaggtaggaaacaacctgaatttccttcaaaaaggaactggttaaataaattagactactaagacacgtgtatgcttgtacatggatcctatatgctcctctgctgtgtgtgtgtgtgtgtgtgtacatctcactggaaagattacacaagaaattggttaacatttgtagtctctgaggaagggactagggggctaggagacatgggaagatacttttcactgtagagacttttgtatcttttgcattttgaaccatgtgaatgtattcttaatttttttttttcgagacaagagtcttgctctgttgcccaagtggagttgcagtggtgcgatcacagctcactgcagcttcaacctcctgggctcaagggatcctcccacctcagccttacaagtagctgggaatacaggcatgatccaccaaacgtggctgtgaatgtattatttatgctcaaaaatgcctaacagacagggcatggtggctcatgcctgtaatcccaacactttggaaagctgagatgggaggattgcttgagactagtagtttgagaccagcctgggcaacatagaaagaccctgtctctaaaaaactaaaagtaaaaagtgcttaatagaatcagtgaaaaaaaaaaatctacccctgtgggtcatggctgttggggcgggctcgggagaactgccaagtcaaatgtataacgggtgggccactgtgactctggagcagctgggaggtggaggcggcatcggctcaggtcacaaggatgtggctctcaaggcgagcagcatcctagctgcaaatgcttcctaggacaagccaataaggttggtgcggacatctacacatggacaactctagagagtccaaatccactgttttttttttgtttttttttttgagacagtctcactctgtcgcccaggctggagtgtagtggtatgatctctgctcacggcaacctccgcctcctgggttcaagtgattctcgtgtctcagcctcccaagtagctgtgattacaggcgtgcaccaacacaccggccaatttttgtatttttagtagagatggggttttgccatgttggccaggctggtcctgaactcctgacttccaagtgatccacctgcctcagcctcccaaagtgctgggattacaggcgtaagccaccatgccaggtccaaaatcactgtcttaagacctccgccttgacccttctccaaaagggctatgtttcaaatctgctatcaaggcagcccaggtggctgggtgcagtggctcatgtctgtaatcccagcactttgggaggccggtgagagaggatcacttgatcccaagagttcgagcccagcatagggtacatagtgagacctcgtctccataaaatataaaataaaataaaaatttttaaaaggcaccacagggtagggattaacgggcaaggattctgaagtctgctccctggggtcaaactcagtcctgccacccgccagctgggtgaggccttcagcagttaactcccctctctgtgcctctgtaaagcgcaacaataagagaatctccctggcacagctaaaccctgtgtggtaaattacctatatatgtttttatatcattgcagttcctattacacattgagaaattaccatggctcttaaatttagcaactggaactcttccagttcaccccagcagttgttaaaattacctatgaagtagaatcagaggaaattattaggaaacaaagaaggctgaagctcagcagggaaagtgcgcatgtgtgagctcttcctggtggcaatgacctgaaggggcggcccctggaatctgagggccagcatttgctgtcctttgaggtcaggcctcagccagtctcaggagggtctagcctgggcccccacagagaaaggcatctattactgctctctacagttgtccctcatcctgaagtccggcccttcacaccccatccccagtgcctgggacactgcatgacacacagtcagcccccaatatgacgtaactgaaaaactgaaaataatggatttaggaagatgaaagaagttctggagatggatgatggcgaagggtacacaacagtgtgaaagtacttaatgccactgaatggtacagtttaaaatagttaaaatggtccaggcgcagtggctcacacctgtaatcccagcactttgggaggctgaggcgggcggatcacctaaggtcaggagttcgagaccagcctggccaacgtggtgaaaccccatctactaaaaatatgaaaattagctgggagtggtggcaggtgcctgtaatcccagctaccagggaggctgaggcaggagaatagctggaaccctggaggtggaggtttcagtgagccaagatcatgacattgtcctccagcctgggcaacaagagcaaaactctaactcaaaaaaaaaataaacaataaaaataaaataaaatggttaaaattgtaaatttcacgaggtatattttcacacaatgaaaataaataaataaacggatgagatctagtctcatctttacctgctctctcattaattctcctccaaccccctgacctctcctaggctgtctctttttgtcagttcctgttctctaaacagggaaagggccccagattccctccaatctctatgatccctttccagctggtattaccaggcccttggctttttttttttttttttttgagatggagtctcgctcttgttgcctaggctggagtgcagtggcacgatctcagctcactgcaacctccacctcccgggttcaagcgatcctcctgcctcagcctcctaagtagccgggattacaggcacctgtcaccacacccggctaatttttgtatttttagtagagacggggtttcaccatcttggccaggctggtctcgaactcctgaccttgtgatccacccgccttggcctcccaaactgctgggattacaagcgtaagccaccacgcccagccaaggcccttggctttgattccagctgtaccctgcgcactgtcagcagccatgaacccccagcccaggtgtccgcctgagccccagcggggaccctaacaggcgcaatgcagtcagaacacagctccctcttccttgaccttcctcccgtctccccttctctgttaacagccgttcccccagatgctccggtctaacatctaggcgggccctatgattctcatcttctctagccccaacttccaacccatcagcacatcccacagctcttcctccaaagcacaccctaagcagcccaagcggccctcttccctgctccccactgccatgccctcgcagccatcctggcttcctgcctggactgctgcagtggcatccaccccagccctcccagccattccttctcctcacagaagccagagcgatgatcctaaatgaaactcagctcagcacatcccagctccaaatcctcccgatccagcactcccgggtcactgtgcacattcctcctccttgatcacaacacccccagccacctagcccctgcccacccacctctgcctcatgctggaggcagggcccaccctcacccacagccaccagccttcttcctgttccttgtcccacctcagcacctctgcccctggctgtccctctgtctgaaagctctcctcctgaacttcatgaagccacattcccaacttggcctccatgtcaccccttctgcaaggccttcctatccacaaccactgaagcggccctggccactttctcccactcctcagattccttggccagcaccaccgctttacctacaccccatccctggagaggccctgctcactacctgctaccagctcctaggacaggcctggctcaggggcgctgtgcagcagggaggggtgggcgaccaaaccagtggaaactcatggtctcacaaacggagcccatcatttggaaaggtgccagcaggcaggtgaaatccatggggggaggggatagagtgacaaaaccactacggcttattgggggcagggggcggcctaactgaatggtgactgtggccattactccccctgactcagggcttgcagcagggacatggaccatgtgtgtgcaggaagcctgacctttagagacacagcccaatcctctgccaccatccccagcccagctgcgcatagtgtgaaacagtcctgcaactcaccctgaaggagtgggggaaatgatttgaaagtcacaaaaatatattaaaacagcagctgtcttcactctaggcactggcctcccttcccagtgccccttgcccaccacccgccatacactttcagagacagatgcccagggcaggaaaacggatgcgcctcagccgcagcccagggtctggagaggtccctccagcctgggagtagagggcggctaacagtctcaacaggctcgacgccaccgccgacgagggggccgctgggaggccggaggtacaggagggtcgggcaggacgcagcggacagtcgggccttgccacggggacagaaaacagaagagaaatgaacaaagtgaagacagggagagagagaagtcacagcagtggggggaggcgcagaggagtgagggaggtcagtggggagtgggggaagggaggcccaccaggtgacacccacttagttgagggggacagggaggctgatgagctggggtctgaggcagcagaccctgctcaggggaagaaggggaatgtaggagaggaagaagccccctggcacttgggagaggtagaaaagtgggttctgccaaggccacagccagagaagaaagcacagaggacatgagagaaggggagtcctggagcaggccaggccagctgcgacgaccatcccaggctaggagaaatggggtgatcccccgaatgctcgggcctagctctagagcccgagggagacaagctgtgtcatccaggagctggtgggaggcgtgatgaagccaggagcctggggcggccagggcagatgcccgcaggctctgctgcctgcaccccgcccacaggtgggctagaaggtcctgcggcccagtcttttgaacacgctcacagtgcccgcgtggtccatctgggcaccaaggccctcgctggagctgctcccccggggccccaccagagtcctcttaatggtgaccttgacctcggctgaggacttactcttggtgctggtgacctggctgtcctgggcctcgggcacaagggcagctgcgcccagtctcttgatgatgctgactttagacaaggactccggcttcctctcaagcccagaccgtgaggaaagcgccaggcgccgcagtgtcggggcagcagccgttgtcgctgagcttgtggccttggctttgacagtcagtgctggctggggactggccttggctgggccccgtcctagcttcttcaggaccccggcatactgcaagacagagctgctgctgtcattgtcgctgtcccaagccagatcctcgtccgtttctggggtggcccccaggcggctgaagactcctgtgggctgtggaggtcagagacaggatgaatgagtcactgagtcactcaacacacattcatggagagctgcttcctctgtgcctggcctcctgggactcacagttgggagaaacacccatcactgacaccccagatagtggcgagagccatgatgggggagtccaggggactggaggagcccagaggaagtacctgaccttcctagaagttcagggagggcgccctgagaggggggacatctgagctggaagtaggtctaagaaagagggaagaggacgggagtgccgcacaaagggaatgtcatttgcaaggtcaataggtgggcatgagtggagtggagagattaatctggtcattcactccacgaatattttgagtcccaattctatattgtacctggtcctaggccggcagtgctagggacacagtgatgaccaagacagcctcagcgctgcccgcatggggctcacagtccagtggggaagacaggcttggcatcagaaatgacacaaataattctgcaagaatgacagtaacgcattctagacggagaaggacagctggagggcagaagacaggggtggctcctcatcagtccagaggaactttccctgaggcaccaactttgaagccaggccctccaagatgaattagcaaagaaaagagtatgtgctatgccctgaaggcaggaagtataatcctatgtattgagcactcgctatgcgcccagctcttcatagggctggaacttccagccacatgatcccgagtgttcccatcctcctcatggtaagattcttggaagtgagcaagcccgagttgctgcaccctgcagagcaggacactggcaggcaggaaacgcagctgggaggctctgcaatagttcaccaacaggcgccgcacaccccagcaccatgcggggatgatcttaactctacagccatccttggaggtgggtctatacagatgaggaggctgaagtacaaaggacttaagtgacatggccaaagccacgcagtcaggcccctgtgggcttcagggtgtactctgagctacacaccaggcctggggcctgtgggactgcgggccgcggcaggaagtacaggctgcatcatgggcacagtgaagagcctctgcagggcttccagtgaggggacgggccctgtcctgtgggccgcacacactgctgctgtggggataggggctggggtccatggtaactgtgcgagaccattcaggaggctatcatcctatcctgacagggagaggtggcagaggagggagagacagtagagtcatcagacccactgacagactgcaatggggagggcaggcagccctcagatgggggcccaggagagggctgacttggggaaagacactaagaccagttggggacatggtgggtgggaggcatccaggagtactggacccccagggctggaaactgggagagaagccagggcagaagacagatgggaaagccgccagtgcaaagccaggaactgaggctggaaaggcaggttagacggccctgggccgagtgaggttgagatgtgttaaagagtcaggagcaccgctcagggaagacaacagctcgcacgcccagaatcgctcccccatccccactcactttactccctgtcgtggtgtctgccttggtctcggcgccgaggcggtcaaacacagacgtcctatggagacctgggagggaagtgaagccatcagggagaggccccggtgggccaggcctaggctgagctctgtacagacaccaaggcagcccagacaccagtagctctgggacaggcagggccagactgtgctgagttgggtgttatgtctacactgttggctcacactgaccctaacccacccctatctggctagagccaaatgtgggaaagaccagctacaagtggcagattccctacacctcagcactagctcatgaactgtgtgcacgggaagagttcttagtgcctgcatgttcctttcacttcttggggtcagggacctctgagagaatctgatgagtggtagtgcatcctcccctaaattataacctaatagccatcaatagaatggttactaaattatggtatatgaatactctggaaataataaacaaccattgaaaaaagaatgaagaagatctacctgcattaatatgagaagatctcaacaaaaaatttatggaacatgggccaggcatggcagggtgtacctgtaatccctttgggaggctgaggcaggtggatcacctgagcccaggagtttgggaacaacctgggtaatatagtgagaccccatgtctaaatatatatatatgaacaaaaaagttatagaacatgccaagagtggtgactcatgtctgtaatcccaacatggtgggaggtggtggtgggcagatcgcatgagcctaagagttagaaaccagaatttaaaaattagctgggcgtggtggcccacatctatagtccctgctactggggaggtaaggtaggaacccaggaggtcgaggctgcagtgagccgtgttcgtaccacagcactccagcccaggcaacagagcaagactctgtctcaaaaaaaaaaaaagaaaagaaaagttaggtccaggcatggtggctcacgcctgtaatcccagcactttgagaggccaaggcaggtggatcacccgaggtcaggagtttgagaccagcctggccaacatgatgaaaccccgtctctactaaaaatataaaaattagctgggcacggtggcgtgcacctgtaatcccagatgcttgggagactgaggcaggagaatcacttgaactcaggaagcggaagttgcagtgagccaagattgtgccactgcactccagcctgcgtaacagagcaagactccgtttcaaaaaaaaaaaaaagttatagaacaatacttacattttaaacacaaatactatttgtgtttaaaaaagaaaaactaggctgagtgtggtggctcatacctgtaatcctagcaatttggaaaggtgaagcaggcagatcacttgagctcaggagtttgagaccagcctgggcaacatggcaaaaccccctctctacaaaaaatacaaaaattaggtgggcatggtggcatgagcctgtagtcccagctactcgggaggctgaggcaggactgcttgaacctgggaggtcgaggagactgcagtgagttgacaaggtgccactgaaccccagcctgggtgatgaagtgagaccctatcacaaaaaaataaaaattaaaactaaaaaacaaaaaactgcctatatatgtgttatgtatgtacctagatgctggtctggaaaggttaacaagagacggggatatgggagtgagggaaaagagtttgtttttactgaatatgtttctgtatcatctgaaagtgctggagttacaggcatgggccaccgcgcccagcctttttaatagagataggggctcactatgttgcacgcttgaactcctaggctcaagcaatcttcccacctcagactcccaaagtgctggaattacaggtgtgcgtcaccacacccgaccaagagatcatctctgtactccaagtcagaaggcctagctttggactatatctccactcgtctcctctggttcatattaacggtgccactttggggtatttgcccttggccaagcacagccactcattttacagcaggccatcactctatcgttgctcctgccccttggggaagaggtgccaaggggcccagctacactaactgcaggatcagagggcagaggtgatgtatttccctcctctgcagccaccatcactgtccccttggcctacggctcctgcatccccgttagaacctgcttctcagccaccgtctgtaggatatgacgggccctgtgtgatgcagagggagggacatggaccccgcagggaagcatgcccctgatgggccagtaccttttgcagcctgctgctgctccaggatcttgcgggtgcggggtgtggtgcctttgggcatgttgatgacgtacttcccctccatctcagcagtgacccggcgccgcttggcaggaacagccaggctctcctcctcccggcgggccagggctgctgggggaagaaagcaggggtatcagcactctctgagacagaacgttctcccaggatggaagctggacactaggtgtcctttatctccacacattcatgactggaatcccttaccttcccaaccacccacatcaccactgaccgaaccacagagaaactcaggtctctgttacacgaggtcacagaaggtgctcagaatccccaggctgtggcaggcctcccaggctttctgtggctctgtccctattccaagcaggcttctggcccagcccagcccacatcccctcggatggggaacctgctgggtggtggaaaggttctagagctccaagcaggcagtgctttatggctgcactcacttgtcaacaagcacttgagctgtgtacacttatgagtggtggattgtgcataagttacacctcaatttaaaaaatgaatcccctcaaacgtgttaagggttaaaagagccagttgctcccaggctcgccatcttcgcaatactttgttacactgattttaacttttttttttttttttttttttgagactgagtttttgttcttgttgcccagtctggagtgcaatggcacgatctcagctcactacaacctctgcctcctaggttcaatcgattctcctgcctcagcctcccaagtagctgggattacaggcatgcgccaccacgcccagctaatttttgtatttttggtagacatggggtttcaccatgttggtcaggctgctcttgaactcctgacctcaggtgatccgcccacctcggcctcccaaagttctgggattacaggtgtgagccaccccgcccagcctttttttttttttttttaaatgtagagacagggtttcatcatcttgtgcaggttggtcttgagctcctgggctcaagtgatcctcctgcctcagcctcccaaagtgctgggattataggcgtgagccaccatgcccagcctgattttaacttttttgcttgtggcacacaaatcaaaggccagaagagggtgaggcacttccaaacctgcaggacaaaggggagactttgtgatggaggtggacggggcgtgataggagtgggtgtcagaaacatgaagcgccctgggcctcagtttccacatttgccttatgacaccatgaggtcattgctgtggggatgggtccagcaaaggcttaagagcatggtggacgggaaggcctgggagcccagtgactgcaggcccattcccagctctcaagctgagacctggaggaggacagaggccaacatggagcagtctgggaaggaagagtgctcaggccaaggggtcaccaggagcaaaggccccatgatgggaaggaggctggaggggagcaagcgagcatgcaaagtggggcgatgcaagagatgaatctacatgatgcagggccctacagaccatgtggggaagatggcctttattactggaataatggggagccccggagagttacagcccagggggttacaggatcagactgaaggttttcaaggatggatcccttggctgctaagaggaggcaagaggttcttaacctatgaccccaggcatcaagcacagagctgtgcacaagtagggggctcggtgaagacctgttcacaaagcgtgaacccctgagtgagaaggcaatgcacacatgcctcaacacaccaactcaggtgcttctgtccatcctcctgggtggggtatcgccaccccccatgctacagatgaagaaagtgaggcccacagacgtatggcaccttgaccaagtttacagaggtgattcaggttcaaatgttttgtataccttgtggccttcaaagcaccttacaatattggaagcatgacccccaacacctcctaccaacccacgttcccctccagctcctcctaccacctgcccatgttccctcaccagtggccttggcactctttgctgccatcttgttggacacagtgaccgagatcttggaggtgctggtgtccgggcgcctggggggtgtgctgggtggagagtcatggttcaggctgttggtgatcattcgggaggcagctgtggggagaaaaggagagtccggtcgggtggggtcctggaagacaggcctcaatccagcagtctcagggtcaggatggagaaggtgaggcttgagactgaatgagaaggtcagcgggtatcaccctgtaactgcatggtactcgtgatggggatgcttgggggcagggtgggctgcatctccccaggaactagcccatccctccctatcctgggagcctttcctgaggctctagaccacactagttctgatcacacctcacccatcagtcacccagcctcgtgctgagttcgcttcgcccctcccggagctgcttcagccatgctggtctccaggatcttcctcacctagcaagtaggcgcttcctcagggtccctgctgttccttctgcctggcatgcagttccccaagcacagcggaattgctgcgtctcatcattcaggcctcctctctgatggcaactcctcagagaaaacttccctgaccaccccatcaaaaacagcacctcctcaacctctatcacccttacccactttcattttcttcacagcccttacaactgcttgacattaaactctatttgtttactggtaaactcactcacaagaacataagctccacgaggaggctgtgtctgtttactgctgtatcccagtgcctaaagtggtttctgaggacaggcacaagggcgcatgcctgtaatccctgcactttgggaggcctagggggatggatcacttgaacccagttcaagaccagcctgggcaacatggcaaaatcccatctctaccaaaaatacaaaaaatcagccaggcatggtggcatgtgcctgtagtcccagatactcaggaggctgaggcaagagaatcacttgagcccaggaggtcaaggctgcagtgagctgtgatcgcactactgcactccagcctgggcaacagagtgaaacccagtctcaaaaacaggggggaaaaagaaagaaaactacattaaaccatcacagaacatttaataaaacgtgacccccaagcacccagcacccaggcatcatgacattattggtacccagaagtcccaggacagatccttccctatcagacctcctccctctctgcaggaagaaattcttggttttcaggcctgctctctctcctctgttaataatataccccagcacttcttcagacatttttcaggttggatgggtggctttatgtctaatggctgcaaactctctggctatgcagaatctgtcctgtgagagcctccattcacaatactctttacctagctgagtgcaataggatcaggattttctgctataaaaggcaagctgttaagagggccctacctgtcctgctgtacccagagggaaatctgcagctgaaaagatgtcaggaatgtgatgctttattgtcatgacaggcaagccccatttgggtggcggttaagcaaccaactctgtctttactctgtcttgcatttgcgttgcagtcaggatatcagaatacaaagaactgttctctttcccactcctgacagacacatcattcaatgttctaaagtgtgtaaaagtgatcatctcaggaatgtttttagagcattcttcccacccctttctttctttgcctgtttccccttctctttttatttatttattttcatttactttccctttcttttttttcttttttttttgagacagagtctcgctctgtcgcccaggctggagtgcagtggcgcgatcttgactcactgcaagctctgcctcccaggttcacaccattctcgtgcctcagcctcccgagtagctgggactacaggcgcccatcaccatgcccggctaatttttttgtgtatttttagtagagatggggtttcaccatgttagccaggatggtctcgatctctcgaggtctgacctcatgatctgcccaccttggcctcccaaaatgctgggattacaggcgtgagccaccatacccggccctcttttttttttttttttttttttttgagacagggtcccactctgttgcccacgatgatggagtacagtggtgccatcataactcactgcagcctcaaagtcctgggctcaagcaatcctcccacctcagcctcccaagcctcccacagctaatttactaatttttgtagagacagggtctcactatgttgcccaggctggtctcaaatgcctagcatcaagtgatcttcccacctgggcctcccaaagtgctgggattaaaggcatgggccaccatacccagctgaacatttcatttataaagatttgaaagactggtaaaactaatgtgtgctgttagcaatcagggtagtgggtaccctggagacaatgtggtggctgggagggggcacagggggattctggcaggctggtcatgtttccattactggatttgggtgctggctacatgggtgtcccatctgtgaatggcaccccactgtaatattatgggtgaatgcttttctgaatgtatgttatggaggagtgttgcagaaacgaaccctaatttgctcagcttctttgcatccacatctttgggtaggccctacccacaatgactgtggacttagccatgtaacttgctttggccaacaggacaagagcaaatgttgtgcaagcagtggcttaagaggtgctttgcacactggggccagccctcttctgctgcttttaggaaccctgcaaccaccactgtgaacaagcccaggctagccagctagataattatggacacgtagccaagtcaccctgtgggcccagataacatcaggacaaccatcagatatgtgaatgcggccgtcaacccggcttcaacctagctgccaggtgaccactaaaatcagctgagctggcctagagcagaactgaccagccaacccacaaaatcatgagaaataaacacccatgttttagcaagacatggtggcttgtgcttgtaatcccagctattcaggaggctgaggcaggaggatcacttgagcccaggactttgaggctacagtgagctatgactgcaccactacactccagcctgggcaacagagtgagactcccatctcaaaaaataaaaatacatgtctgtgttttaaagcacagttttgggcggcttagttatcagcaaagggaagctaatgtgtatattaaaattttaaagtttatttttaaaaaaggtatctgtcgggtgcggtggctaatggctgtaatcccaacactttggggggccaaggtgggtggatcacctacagtcaggagctcgagaccagcctggccaacatggtaaaacctcatctctactaaaaataacaaaaattggctgggcatggtggcaggcacctgtaatgccagcaactcaggaggctgaggcaggagaatcgcttgaacccaggaggtggaggttgcagtgagccaagatcatgccattgcactccagcctgagccacaaaagcgaaactccatctcaaaaaaaaaaaaaaatggtatcatactgcttttaaaaaccaaaaatagccaggtgcagtggctcatgcctgcactttgggaggctgaggcaggtggatcgtttgaagtcaagagttcaagactagcctggcaaatgtggcaaaactctgtctctactaaaaatacaaaaattggctgggcatggtggcacacacatgtaatcccagatacttgggtgactgaggcacaagaatcacttaacctgggaggcagagtttgcagttagctaagcgtgccatcgcactccaacgtaggcaacacagcgagactatctcaagggaaaaaaaaaaaggtcaggtgcagtggtggctcacgcctataaccccagcactttgggaggctgaggcgggtggatcacctgaggtgttcaaaaccagcctggccaacagggtgaaattctgtctactaaaaatacaaaaattagccaggcgtggtggcaggcacctgtaatcccagctactcgggaggctgaggcaggagaactgcttgaacccgggaggcggaggttgcactgagccaaggtcgcgccactgtactccagcctgggcaacagagggagactccatctcaaaaaaaaaaaagaaaaagaaaaaatataaatacagtcaatactcatcattcatagattccatatttgcaaacttgcctactcattcaaatgtatttgtaaccccaaaatcaatacagcagtgctttcactgtcattcacagacacacacagagaacattttgagttgctccagacacgttcccaaatgaggacaaagaaggcattctcaccctcttatttcaggtcccgctctgtaaacaagcatcctttgcccagtctacttgatgtcatgaatgtgaacatttttcacatttttgttggtgattttgctgtttaaaatagccccctggacgggagcagtggctcacgcctataatcccagcactttgggaggccgaagcaggcagatcacttgaagtcaggagttcgagaccagcctggccaagatggtgaaaccccgtctctactaaaaatacaaaaattagccgggtgtggtgacaggtgcctgtaatcccagctacttaggaggctgaggcaggaggatcgcttgaacccgggaggtggaggttgcagtgagctgagatcgtgccactgtactccagcctgggcaacagagactccatctcaaaataaataaataaataagaaaataaataaataaataaataaataaataaataaaatggccctcaaagcacagtgttgaagtgctgtctggcttcctaaatgtaagaagggtatgatgtacctgatcaaaaaaatgtgtgtgtgagataagcattgtgcaggaatgagttacagtgttgttggctatgagttcccggttaatgaaatcaacattatgtattaactacagtgcctttaaaaggagacacacataaaataaagctatatatttgacgacaggcttgcaggaacctaacctagtatttcccataggagcaacggattctccattgctctgtatttcttctaggagctaagaattcactaagtgtacatattaactttacagaacttaatgaccacagatgacaattgactgtgtgtacagccattcactacccagtttattttttcccctaaaagaagagtaagaattcctccaatggctttgtttctacctttgaaaattacaggcggggatgggatggccagacgtgtccccttcactgacagggtataaaaatcaaggaaaagaggcctgaatagttaggactcaccactggtgccacggcgaatttcgcctgcaagggggctagggctgcagggtactgactcagtggcagctttgcacatgtcctgtgaaaaaagaacaggcacctgggtcaccacagaagaatcatgcatcaacctagagatctaagcaacaccacaaggatcaacacctgactgctagagaagattctaacacatttcactcctaaccataagaaagcatcagatacctccaaactgagggacactctataaaatatctgaccagtatattcagatatatatatctgaagttcagcctcctcacctattgaaaaaataggccaggtgcggtggttcacgcctgtaatcccagcacttcgggaggccgaagcgggtggatcacctgaggtcaggagtttgagaccagcctggccaacacagtgggacgcttatctctagaaaaaattaaaaaactagccaagcatggtgtcacacacctgtagtcccaattattcaggggctgaggtggtaggattgcttgagcccaggagtttgaggctgcagtaagctgtgattgtaccactgcattctagcctgggcaacagagtgagaccctgtctccaaaataggtgaaagatggccaggtacggtggctcacacctgtaatcccagccctttgagaggccggggcaggtggatcacctgaggccaggagttcaagaccaccctgggcaacatggcaaaaccccatctctactaaaattataaaaactagctgggcatggtggcgcacgcctgtaatcccaatcactcgggtggctgaggtacgagaatctcttgaacttgggaggtggagactgcagtgagccaagacagcaccactacactccagcctggcaacagggcaggattctgtctcaattaaataaaataaagaggccaggcacaggggcacatgcctgtaatcccagctactcaggaggctgaggtaggagaatcacttgcacctgggaggcagaggttgcagtgagccgagatagtgctactgcactccagcctgggcgatggagtgagaccctgtctcaaaaataaataataaacaagtgaagaaaggaaggaaggaaggggggtagggagggagggagggaggaaggaaggaagggagaaagggaaggagggagggagggaaggaggaagggaaggagggaaggagggagggagggagggagggaggaagggagggagggagacagtgcctggcaggccacagcaagtgcttggtaagtgttagctattatattaatcacttaatgagtacagcactccaggtctggtgctcaaggccacatatactatctggtaggtggccacagccacactagcatcagggctgtgtgagaagcccatttcaaagagatccaggaaggtgggtcactataagtggaggggtcaagactggaatgtccaggttgtgagccaggttgccatctgggtcccacataggaagctgctgtcctggagataatacttatcacaaggaaaatgtgaagcagcaataatagttattacagagggacccaaatacaggcagtttccactgtgctagtgcttcacatagcttaatactcacaaccagggctgggagcagcagctcatgcctgaaatcccagtattttgggagaccgaggcaggaggatggcctgagcccaggagttcgacaccagcttgggcaacatggcgagacaccgtctcaaaaaaatatatacaaccaccattcaagattttttttttttttttttcttgagagagtctcgctctgtcgcccaggctggagtgcagtggtgcgatctcggctcactgcaagctccgccacccacgttcacgtcattctcctgcctcagcctcccaagtagctgggactacaggtgcccgccaccacgctcggctaattttttgtatttttagtacagacggggtttcaccgtgttagccaggatggtctcaatctcctgacttcgtgatccgaccacctcggcctcccaaagtgctgagattacaggcgtgagccaccgcacccggccaggtttgcctctctttcacagatgcagaaaatacagctcagagaggttgggcaatgtgcccagcgtcacacagcaaatggctgaaccagccctggaacctgggtcggcctgcctctgctgccaggcctcccattggctctgcaactgaccctccacctccatgccaaacccagagacagaggggctgggcacagcacccacctgacggtgcaccactttggcatgcttgagaatggcgatgatgtcacccaccacggtcacgcccagctcattcattatctccttattgagatccagcagcatgctcttctgaatcctgcagggaaaggtcagtggtgaggccccaggtgggccagagtgggtgggccagccagctccccaccaccccatccccaagttcagcctcctcacctattatccacaaacatcacggcataattgacggcaggtcctggaggaatgccggcttccttaaagaactggatccactcggaagtggctgtggggttggacagggctcattactcacactgtcctctttagagaatagcattagcaaaaccacaatcacagcagctcccacaaattaaatgctcatcatatgccaggccctgcatggagtgctccacacacacatgatggaactgagccttcctgaccctgtgagttaagcagtattaagattcgcctgagttgccgatgaggaaaatgagatagggaaaggttgggcaacccaccccaagccacaatgctaaacaaggggcagagctcccaaacctttaccacagcctttctccttacagctccaccccgccccagtgcttgctctctgcatcactacacatgctgggcccatgactgatttagggtaactgggactctgggttctctgccctagtccccatcagccagcctaggcccagaggatgataggatcctcaggtggctggaaagaagcatcatagagccagcccatgagccttggcaagcccccacccgccacaatagcaaacctccctcagagagaggcatggaagttactaacatgggcttcggagcttgggtttgaatcctaaccctgcgatttccctatggagggactttgggtaagttaactcttggtgccttggtttcctcatctgtaaacctgggataacagatctgacaagtgtttacccagcatttggcaaaggacaggtcctgtcctacacacgggggataccacaaggcacaagatgaagtcccagcccttgtggagctgagattttagtgataacagccccaatgtccttgagtcactgtgcagactcaatgagaacctccatataaaaggctttaaatgatgcttgacccagaggacatcctcaaaccatgacagcaattattattattattattattattattattattactattactcccatcaccactaaacatagagccacagccaagaccaggcagaccccacctatgaaactttattctttctaaattttcttggcttcttggtgggtgtgaccctcaaactgaccccaacctgccaggccaggtgatagctaagatcactgattcgaagtagaactttttttcacattttgacatctctgaaactaggatctacttcatgactgacagtgtgccatagtttaattagcaaactgtttttctttctcagtacatccaataatccatgctattttagattagaagaaatctgttattacctcacccatttttcttttaagacaatagagactcagagcagggaaacagacacacaggtgttacacgagtggcagtgcggggctcaggtgaaactccatgggccacatctccaagaaggcccctgcccagccagccacaggccggttacccagggtgctgactggcccttggggactgaggctggcgaggagctcatgtccttaggatttcctccgccaggccagaggaaaggggtaccatttccctatgttgtgcaggcaccatccacctgctaagccatagggccctgggtcccactgaccagaagcaggcacctctaactatcaacaagcaccacataatgattccatgtatatgaagtgtctagaacaggcaaatctaaagagaaagtagattagtggttgctagggggacaggggaagtgactgttaatgggtatggggttttaatttttttgagacagggtctccctctgtcgcctaggccagagtgcagtggcgcaatcatagctcactgccgtctcaacctcctgggctcaagcgatcttcccacctcagcttctcaagtagttaaactacaggcgcatgccaccaggccaggctaattttttgtatatatatacatatatatacacacacacacacacacacacacaaatatatatatatacacatatatatacacaaatatatatatacacaaatatatatatacacacacacacacaaatacatatatatatatacacatatatatatatttctttttagatggagtctcattctgtcacccagactggagtgcagtggcgcaatctcggctgactgcaacctccacctccgggttcaagcaattctcctgcctcagcctcctgagtagctaggattacagccacgcgccaccatgaacagctaatttttgtatttttagtagagacggggtttcaccatgttggtcaggctggtctcaaactcctgaccgtgtgatccacatgccctggcctcccaaagtgatgagattacaggcgtgagccaccgcccccggcatttttttgtattttttatagagacagagttttgccatgttgcctaggctggtctcaaactcctggactcaagcgatccacctgcctcggcctcccaaagtgctgggattacaggcatgcaccataacaccctgctaaggtatggggtttcaagagagagtgataaagatgttttaaaattgattatggtgatggctgcacaactctgtgaacagataatataaaaaccatcgaattatacaccttaactaggtaaaatgtatgataaatgcattatagctacactaagctgttattaaggggagaaaaaagtaccacgtaggttgggggtagctctctgagccaaagcctatgattgattaattgactgattgactttaaggctagtcaagtgaagcagtaggaagggagaaggaacaaagaaatctgtaactggttgtgatcaattagttgtaaagaccaatcagttcctagggaccaggcaaagcctgtgaatttaaccaagagattactgaaacccagtgtttgaggaattgaaagagtccccacattaagcacacaccatcatttcatgtattgctaaggaaggaaaatatgcagccaattaaactgtcataaggcactggctgtaagatatacccctacttcagaaatattaagttgtgcaatgatgtgagtcttggaatcgatgagatgtggcttgttgcacacaccaggagacacgtacaagaatattcatagcagtttgtctgtgatagctccaacccagtaataatgcaatatccattgacagcagcattgataaacacacggtggtcactctcaaggtgaaatactatacagcagtgaaaagaaagtcaacatagatgacccttagacattatgttgagcaaaagaagccagatacaaaagaacacaaggtatgatttcattcatataaattcaaaaccaaagtctatagaataggaatgtcccactggtaatacaactataaagaaaagcaaggaaggccaggagcggtggcttacacctgtaatcccagcactttgggaggccgagatggacggatcacctgaggtcaggagttcaagaccagcctgaccaacatagaaaaaccccatctctactaaaaatacaaaattagccaggcatggtggtgcatgcctgtaatcccagctactcaatctggaggctgaggcaggagaattgcttgaacccaggaggcagaggttgcggtgagccgagatcgcaccactgcattccagcttaggcaacaaaagcgaaactccatctcaaaacaaaaaaaaaaaaaaacaaaaaaagaaaggtaaggcaagaaaatatgttcacagaatgatttattccatatggagaatggagaagagaggggagtgagattggggtaggactctcggggggctgacaatattctcttttttttgacctggatgggtaatagggtttggatttttcaatctttttatggaactataatgtacatgcaaaaaagtgcacaagtcaatagatcttcctaaaccagacacacctatgtaatcagcacccaaatcaagaaatcaggtatttctaatacctcagaaccctttatattacctttagagtctctactcactccttcccagaggcaaccaccaccttctaacaaaatagattttgcctgcttctatgctttatataaatggaattataaagaatacaggcagccaggcgcggtggctcacgtctgtaatcccagcactttgggaggccgaggcaggtggatcacgaggtcaagagatcgagaccatcctggccaacatggtgaaaccccatctctactaaaaatacaaaaattagctgggcgtggtggcacgtgcctgtagtcccagctacgtgggaagctgaggcaggagaatggcgtgaacccgggaggcagagcttgcagtgagcggagatcatgccactgcactccagcctggcgacagagcaagactctgtctcaaataaaaaggaatacaggccaggcgcagtggctcacatgtgtaatcccagcactttgggaggctgaggcaggaggatctcttgagcacaggagttcaagaccagcccaggcaacatggtgaaaccccatctctacaaaaaatacaaaaattagccgggcgtgatggtgtgtgactatagtcccagctactcggaggctgagatgggaggatcacctgagcctgggaggcagagggtgcagtgagctgagattgcaccactgcactccagcctgggcaacagtgtgagcctgtctcaaaaaaaaaaaaaaaaaaggatatactcagattttgctttttaatcactcttaaaactatacaaatatattttatgggccaggcgcggtggctcatgcctgtaatcccagcacttagggaggccaaagagggaagatcacctgaggtcaggagttggagaccagcctggccaacatggtgaaaccctgtctctactaaaaatacaaaaattagctgggcgtggtggcacgcgcctgtaatcccagctacttgggaggctaagacaggagaatcacttgaacccgggaggtggaggctgcagtgagccgagatcgtgccattgcactccagcctgggcaacaagagcgaaactccatctcaacaaacatacatatataatatatataatatacttttctatattataataaatgtcaaaatttttcaaagccaccaactaacctctgtgccttagcaatccccaaatacagagcttaaggcttgtgataataacaacacctaaggtttgtttagaactatgcccaagcttttacatgctataatctccttaatcccaggatgtgtgaatatcatttccatttcacaggtgagaaaaccaaggctctgtgaggccacgtgggagacctgctggacttcataacccacgttcttcacagctaaactatacagtcaggagagagatccagtgatgaggcgggcaggcctcaagcagttccagccccaccctgccacggtcctcagagtacagctgttcctgccagtgacccagtcctccctcccccatcccatcatcccccaccaaggccatacctcaaaaagggcagtggggagagggggccctggagagaaggccacagactcacccatagtcacggagaccatcgtctccctggccctgacactgctccctggagcctgaaagagaagagaggagagagcccatgagctgctgccggctgtgagtgtttgtccctctcctgtgcctgtctgtctgcatgccagaggaatgttcctgggctaggggctcaccgcccaggaatagcctggagcagctggcaggaagtcagcctgggacagagctgccaccaccatcatcgcttgtgcctgagacaaggcccagggacagcaaatgtccacagctccattcacacacaccccaaaaggttggctggaaaaggagtgcaacagaaataagacacttctggccaagactttaacaataaataccagccaagcatgctggctcatgcctgtaatcccaggactttgggaggccaaggtgggaggattacttgaagccaggagttcaagaccagcctggacaacatagcaagaccctgtctcaaaaaaaaaggctggtccgaaggtagtgaattatctcaattgactgttcatagtcctttacagatggaactccttattctactctttctccttttctcactactgcagttgactagtcttcaaacaaacaaacaaacaaacaaacccaaaaccctattcactgagaacctactatgtgtaaggcacttagggataccaagttgaacaaagccatggaacttagcagctagctgggtacaggggacaggggagacagagagtaaacaagccaaacagttaatatagtacgttaggaagcctttagtgccacggagaagacatggaggacctgggaagggaggggttgtaattttcagcagagtgatcagggaagacctaaagcaacatttagagacctaaagggagggaagcaatgagccatgtggttttacagagaaaaagtgttccagaagaaggtacagcaagtccagcgccctgagccagtggctcatctggcatgctggagggaaagcaaggagccagtgtggctgcagtggagcgagcaggaaggacactgggaggagacaggtcacagaagtggcgacctgatcatgagacgtcccagagaagacatggaaaaccaattttcccttacattagcagatggtagaaaggtggtgttaaggacatattagcaccaatggagactgtctccgttaaaagcagtgttgaatgggaactaaaggaaataactttttcatgtgctgattcaacgctatgcgactccaggatcatggggcccacactgccctggcccaaacttccttcctacttagccctctgcctcttccctgacccggctcctctgccctcttccctcactctgttcccttctatctaccgcagcccccaatactgatcctccctcacccccgcatggggtgcagaagccctctgtcccagaaccttcctgtttaccaccccatacgacctgtcccatcccctaacagattttgatggtataatggagtggtcaagagtaacaactctgcaaccagactgtacagttcaaatccagctctaccacttattagctgtgtgatctcggcaagtgacttcaacagtcaggccgcggtgtcaccatttgtgaattgggagggtgcaaacatgacttaccttagaggactgctataagggctggatgagtttctatgaataaaagcacttgagacagtgcttggtgcctactaagcaccctggaggtgttgtgcctggtctcatcctccaggcctccttccccacacaggtgctttgccggcctcccagtttttagaggatgtcacctgtgcctggaatgcctgtctcctcctggcaacctatccttccttctgctccactgccatctactttgtgacactttccctaagtccccacatatgagactctcttctctatcctcactagggttaatcttgcccttctctggcttctgctcaattttttttttttttttttgagacaaagtcttgctctgtcgcccaggctggagtgcagtggcgcgatctcggctcactgcaaccttcgcctcctgggttcaagcggttctcctgcctcagcctcccgagcagctgggaccacaggcactcgccaccacacccagctaatttttgtatttttagtacagatggggtttcaccatgttggccaggctagtctcgaactcctgacctcaagtgatctgcccacatcagtttcccaaagtgctgggattacaggcacctggccttctgctcaatctcttattgatgagtatgaccacagacatcactctgtcctgtactcaacactcttagatccaatttccctcctgaattttaccactggccaaagacaatacaggccaggagcagtggctcgtgcctgtaatcccagcactttgggaggtcgaggcaggtggatcacctgaggtcaggagtttgagaccagcctggccaacatggtgaaaccccatctctactaaaaatacaaaaattagtcgggcatggtggtgggcgcctgtaatcccagctactcggcaggctgaggcaggagaatcgcttgaacccgggaggcagaggctgcagtgggccgagatcacaccactgcactctagcctgagtgacagagcaagactctgtctcaaaaaataataatgaaataaaatacagtacaacatgcatctctcaaagaacagcacggagaggtctcagtaagtcagacagaacatctcacaaaccaagcactaactatgcatcaggaccagcgccaagcatcatgcagatgcatcccaacagctcagcaagtgaggactattattagccctgtttttatcgatgaaaaaccccgactcattgaggtgcagtcgtttgtcaaatggcacatctagcaactgaccttactgggattcaaaaacaagttcttcctgattctgacgtccagggaataggtcccattgagtgcttactatgtaccaggaactgagcatatacacatctcagtcgctcctcacaaccaccctcggaaagttacagatgagaatggcaggtccaagatcacacagcaaaaggctgggcacagtggctcaggcctgtcatcccagcactttagggtcaggaggatcccttgagcctaggagttcaagatcatatagcaagtaaaggaagcagcaggacttggaccccacgcagtccaatggctatggttcatgctgattgagggattactaccagccaggtactatggtctgtttttcaatgtctcagttaatgctaaccagaatcctttaagtactggtattctcccccaagtgctacagaccctactgaattcaatttcctctctccacaatcttaaaagcccatctccagcactgactttccgaatagtgaaaattataatagtgattttaaagacagcagctcccaaaactcaagggattaccacataccagactccatgtgctaagcccttagaagacctgtatccaaatcccaattttaccacgtcctaatcctgactctggacaagtagcttaacctttctgacctcacttccctcaactgcacaataagaatggtaaggccgggtacagtaactcacacctgtagtcccagcactttgggaggccgaagcaggaggatctctggagcccaggattttgaggccagcctgggcaatatagcgagaccctgtcactgttaaaaaaaaaaaaaaaaaaaaaaaaactgggcgtggtggctcacgcctgtaatcacagcactttgggaggctgaggcgggtggatcacctgaggtcaggagttcgagaccagcctggccaatatggtgaaaccccatctctactaaaaatacaaaaattagccaggcatggtggtgtatgcctgtaatccaagctactcagtaggctaaggtgggagaatcgcttcaacccggggcgggggggggagaggttgcagtgagccaagattacgccacttcactccagcctgggcaacagagcaagactcagtctcaaaaaaaaaaaaaaaaaaaggaaaggtggctgggcgcagtggctcatgcctgtaatcccaacgctttgggaggccaaggcagtggatcacaaggtcaggagtttgagaccagcctggccaacatggcgaaactccgcctctactaaaaatacaaaaaattagctgggcatggtggcaggcacctgtaatcccagctactcgggaggctgaggcaggagaatcacttgaacccaggaggcagaggttgcagtgagccgaaactgtaccactacactccagcctgggcaacagagtgagactccatctcaaaaaaaaaaaaaaaagtaagattaccaattcttggccagcaccttgggaggctgaggcaggtggataacctgaggtcaggaattcaagaccagcctggccaacatagtgaaacccctctctactaaaaatacaaaaattagccaggcgtggtggtgggcacctgtaatcctagctactcaggaggctgaggcaggagaattgcttaagcccgggaggcagaggttgcagtgatccaagatcgcaccactgcactccagcctgggcaacagagcgagaccttgtctcaaataaataaataaataaataaataaataaataaataaataaataataaaaataaaaaaacaccatcttaaaaaaaaaaaaagaggacccttttttttttttgagatgaagtcccactctgtcgcccaggctggagtgcagtggcgtgatctcgtctcactgcaacctctgcctcccaggttcaagcaattatcctgcctcagcctcccaagtagctgggattacaggcccccaccaccatgcccggctaattttctgtagttttagtagagacggggtttcaccgtgttagccaggatggtctctatctcctgacctcgtgatccgcccgtctcggcctcccaaagtgctaggattacaggcgtgagccaccacgcccagccaaggacccattcttaaaggtgttacaaggattaaacgagttaataaacagagtccttagaacaaagatgcacggcaggtggttaagtgcgatgttaagtgtgcatcaaataaaacaaatcttcagtaagctagggaaacagtgggacagtcactgacttaatgctagttttatacaaagtgtgagctgggaacaagtataaggacaacttaatgggggtccatgggatctgacaacagggaatcacacagtacaggttctgaacagtatccctattcaaagggaatacgtagtattccttttcaattatctttccatttcagtgtacaatgtaatgggctgttcagtttccattgtattttacctgaacttttccttcctctcatggccagcaatgctagttttccattgaagacagcaatgcgccgggcacggtggctcacacctgtaatcccagcactttgggaggcagaggcgggcagatcacctgaagtcagaagttcgagaccagcctgaccaacatgcagaaaccccgtctctactaaaatacaaaaaaaattagccgggcgtggtggcgcatgcctgtaatcccagctactcggaaggttgaggcaggagaatcccttgaacccaggaagcggaggttgcggtgagacgaaattgcaccattgcactccagcctgggcaacaagagcgaaactccgtctcaaagaaaaaaaaaagaagaagacagcaatgcaaatttgccttctcaaattaacttactggggaaaaaaatgcactagtcattatcaagaaaaagaaaaaaactagtacttcaggactcagcaaaattggtcaaatagtaagtgacaggatgtcgatttccccggctccaattctaagtttttcctattgctgtctctgagctttctcccccagcttccctggaattcccagctacaccaatgactctcagaatcattatcattatagtcccaatccacgagctctcactgtgccagcccctctgcttaaaatctttacacacacagatttcatcagaatcctcaagacgaccctatgatattgggactatctgctctcattgtacagatgagaaaaaacggggttcaaggaagcgaagacacaggccccactgccgcacagtggagcgggacttgaaccaaaattcgacggcttccaaacccaacaatttttcatactaagcgctcaaacatcaatactaataataatagtatagtaacgaagtgagcgttatgcggaggcgctgagctaaggcatccaacgtacacgacctgacttctcactcccatttataaagccggtgatacagtcggattctaacccccattccacaggggaggaaactgaggctcaaagaaacaaatcgtaagtccgaagccgtacaacggagcccgaactgagtccagacacccggacgccacccgtccctaccgcaaccggcccagtcccaccacccccggcccgcgcctcacctggcccaccgggcccgcgcccactcgcgccgcccgccctccctcccggcggcgccaactgtcagacactcctcccccggcccgggctgcccgccccggaagcatcctctcaccgccggaagctgaactgactcgtccgcggccgctctaccccaacaggccgccaccagcgagagtgcggccataaccatcacgtgaccgcccaccgacaccagcgagagtgcagtcgtaaccgtcacgtgaccgcccaccgtcggcccggcgctcccctccgcccgaagctagcaagcggcgcggccaatgagaaaggcgcatgcctggcccccgccggcctgcagtctagccgtagtgcgcctgcgcgcggctaggaggggccgtcaggcggggatacagcctggaaggtgcgtgtggggctgggtctcggagtgggagacgtggagtgcaggtactgtgcgatctgggggcgcggcgcctcggctaccctcctcgtgttgtcttccacgctataatgcatggaatataatatatattatatggaatataatatatggaatataatatatataattatagcgttgtcttccacgctataatttatgtcgtcctcggtctctttatgtcaccattcctctccttctgtctcatcccacttaaatcctcacaactccttctgtcgccatcaccctctttaaatcctcacaactcctcttgttgtcatcaacgcccttaactcgctttcgttccctgtaagccctctttgccaccataggtcgtaatcgctccctttaaattcgtcatcgccatatgttacctgcatcctgcttttgttgccatttctcctttataaaatcctcatttctctttaaaccctcatcatacccccaagtcaccttcgcatggctactgtccccatcgctcttcttaaatcgcgctaatgcaactcttacgtcatcattaccccttgtgtctttgtccctcccttggcatcactgttcctctgaccagtcaccatccactcctcatgcttccagttttccccataaggagccacccagccttacagttatttttcttccctccgtgtcttcgtcatttccccgtgtcacatctcacataacatacggggtactgcagcccattacctggggtgtgtcagaatcccagccccaccactacacctctggataccttgactgccttatggcacctttccaatcccagcttcatctgcaaaatgcacacggggacatccacatcagggctgagtgtgacgattctgtgagtttattcttgtggtaggctcagcttgacatggtgtttttggctaatattgttattaaccatgtcaccctcggccgggtgcggtggctcatgcctgtaatcccagcactttaggaggccaaggtgggcggatcacctgatgtcgggagttcgagaccagcctgatcaacatggagaaaccccgtctctactaaaaatacaaaattagccgggcgtggtggtgcatgcctataatcccagctactcgggaggctgaggcaggagaatggcttgaaccggggaggtggaggttgcagtgagccgagatcgcgccattgcactccagcctgggcaacaagagcgagactccgtctcaaaaaaaaataataataataggccaggcgcggtggctcacgcctgtaatcccagcactttgggaggccgaggcgggcggatcacctcaggtcggaagttcgagaccagcctgaccaacatggagaaaccccatctctattaaaaatacaaaattagccaggcatggtggcacatgcctgtaatcccagctactcgggaggctgagacaggagaatcgttcgaatctgagaggcggaggttgcagtgagcctagatcgtgccattgcactgtagcctgggcaacaagagcgagactccgtctcaaaaaaaaaaaaaaaaaaaaaaactgcatgatcttgggcaactaacttaacctcccagcgcctcagttactgcatctgcaatatgggaatgaaaacacaaattaatcattctgcacataattcttaagcatgtactatatatgtgcccaacactgctagacactggggatacctcaatgaacaatacagacaaaaatatctcggcctggcgcaatggctcacacctgtaatccaagcactttgggaggtgaagtgggtggatcacctgagaccaggagtttgagaccagcctggacaacatggtgaagccccatctctactaaaaatgcaaaaattagccaggcatggtggcgcgcccctaaaatctgagcaactcgggaggctgaggtgagaggattgcttgaacccaggaggcggaggctgcagtgagttgagatcgcaccactgcactccagcctgggtgacagagtgagaccccatctcaaaaaaaaaaaaaaaatctggccttatggactgtgtactacactctagtgggggtaagaggcaatgggtaaataggtaagtagattattggatgtattagaaggggcatggggaatgtggggtcaaggttatagttttaaatagggtggtcagggaaagctttctgagaaggtgacatttgaaacaaatacttgaaggagaagagagagtagggctgggcacggtggctcacgcctgtgatcacagcactttgggaggctgaggaaggtggatcgctggagctcaggagtttgagatcagcctgggcaacatagcgaaaccccatctctacaaaaattagccaggtatggtggtgtgcgcctgtggtcccagctacttgggaggctgagaggtggggggatcgcttgagcctgggagttcgaggctgcagtgagccatgattttgccaatacactccagcctgggcaacagacggagaccctgtctcaaaacaaaaaaacaaaacaaaacaaaaaaacggccaggcgtagtggctcatgcctataatcccagcactttgggaggccaaggctggcagatcacctgaggtcaggagttcgagaccagcctgactaacatggtgaaacctcgtctctactaaaattacaaaaaattaggcaggcatagtggcagacacctgtaatcccagctattcaggaggctgaggcaggagaatcgcttgaaccagggaggcggaggttgcagtgaactgagattgcgccattgcactccagcctgggcgacagcgagattctgtctcaaaaaaagagagagagaaagaaagagtgacatggccctctgggggaacagcatgctgggcaaagagaacagcaaaagcaaaagtcttgcggtaggagcaagcttggaatatttaaggaatagcaaggaggtcagtgagagaggagaggggcaagagacgacattggaggggtgatggggcacatcgtggaaggccttgtgagccatgcagaaggctggcttttactcccagtgaggtgggtgccacaggaggatgtggagccgaggagggatgcggtccagtgtgacatgaagccatcaccctgagctgtggcagctccagaacttctacccaggatcgactagtgagaggcagccttattggaaagagagccagaatcttcttcagtccgcactcacatatcctttatgttgggagaaagtttcaaatatccctgtcaaagatcgagaccgggcgtggtggttcacgcctataatcccagcactttgggaggctgaggcgggcggatcacttgaggtcaggagttcgaaaccaccctgaccaacatggtgaaacctcatctctaccaaaattatataaaattagctgggcgttgtggcttgtgcctgtaatcccagctactcaggaggctgaggcaggaaaatcgcttgaacccgggaggcagaggttgcagtgagccgagatcacaccacttcactccagcctgggcaacagagcaagactccatctcagataaataaataaatagtcataaaatttgagggcaggctagggaaatgctaacggaatttttgagaggccggcgccaccacggggttcagctgctgtcccagacggtggggggcaggcagcaggggatctacagatgatgaacaacaggagaggcagctgtcatgtggcatctgtccctggaagcttgaggcagcttgggttcaaatccttgctccatttcctctctctttttttttaaccaaagtccagttccaggcttaccacatatcctatttctctttatacctgtgacttcacctctctggatccttaattccctaagtgggatttttaagaggactgttgtgaaaattaaatatattaagtccaatttaaaaaaataaaacaaatatattaagtgctttgaggccaggcacagtggcttatgcctgtaatcccagcactttgagaggttgaggtaggcagatcacttgagcccagcagttcaatagcagcctgggcaatgtggtgagatcccaactctacaaaaaaataaaaaactagctgggcatggtggcacacacctgtggttccagctactcaggaggctgaggcgagaggatcacttgagcccaggagttccaggctgcagtgagatgtgttcccaccactgcattccagcctgggcaacaaagcgaggagaccctgtctcaaaaaaaatcaaaaatgaatgcaagaagccccattgtctcactccacaccctgcacttttgcaggctcacgcctccctcaagctgcagggtccctcgcctgatgtgatgaagggagattttgcattgttttgttcatgaattagttcaaccatgtactgccctggaatacaactgagctctgggttcaaattcctagctgatccctataatcccagcactttgggaggctgaggtgggcagatcactcgaggtcaggagttcgagaccagcctggccaatatggtgaaacactgtctttacaaaaaatacaaaaattagccaggtgtggtggcgggcacctgtcatcccacctactcaggaggttgagacatgagaatcacttgaacctggaagatggaggttgctttgagccgagatcctgccactgcactccagtcttggtgacagagtgagacaccatctcaaaaaacaaacaaatttccaactgacaaaccaatgctgtgcaacctaagcaggtaatttccctgagccctgccacctcatctgaaaaacagagatggtaacactgctttgccctaaacttaccatgttattatttttcttttcttttcttttcttttttttttatttgagatggagtcttgctctgtcacccaggctggagtgcagtggtgtgatctcagctcacttcaagctctgcctcccaggttcacaccatcctcctgcctcagcctcccgagtagctgggactacaggtacccgccaccacgcctggctaattttttgtatttttagtagagatggggtttcactgtgttaaccaggatggtctcaatctcctgacctcatgatccgcccgccttggcctcccaaagtgctgggattacaggcgtgagccaccacacctggccctaccatgttattatttttctttctttatttttttgagacagggtcttgctctctcacccaggctggagtgcagtggtgcagtcatggctaactgcagaccaagctcccaggctcaagccatcctcttgcttcagcctcccacgtagctagggctacaggcgcataccaccatccccagctattttttagccttttttttttttttttttttttgagacagagtctcgctctgttgcccaggctggagtgcagtggcgcgatctcggctcactgcaacttccaccttctggggtcaagcgattcccctgcctcagcctcctgagtagctaggattacaggtgcatgccaccaggcccggctaatttttgtatttttagtagagacggggtttcaccatgttggtcaggctggtctcaaactcctgacctcgtgatctgactgcctcggcctcccaaagtgctggggttacaggcgtgagccaccacgcctggcctaggctttttatttttctgtagagacaagatctcactttgttgcccaggctgcccaggtctcaaactcctgggcttaagtaatctccctgctttggcctcctaaagtgctggaatgacaggtgtgagtgagccactgtgcccagccatgttattattattattttatttttcattgagacactgtcttgtgtcacccaggctggtgtgcagtggtgcaagctcagttcactacaacctctgcctcccgggttccagtagttctcctgcctcagcctcccaagtacctggaattacaagtgcgtaccaccacgccctgctaatttttgtatttttaacagagacagggtttcgccatgtaggccaggctggtctcgagctcctgacctcaagtgatccacctgcctcagcctcccaaagtgctgggattacaggtgtgagccaccgtgcccggctgtgttatttttgtttttgtgttgttgttttgagactgagtctcactctgtcgcccaggctacagtgcagtggcatgatctcagctcactgcaacctccgcctcccaggttcaagcgattctcatgcctcagccccctcaagtagctgggactatagatgcacaccaccacgccctgctaatttttgtatttttagtacagatggggtttcaccatgttggccaggctggtctcgaactccttacctcaagtgatacacccacctcggcctcccaaagtgctgggattacaagcatgagccaccatgcccgaccctgttgttatttttgaactgggacataagcctttggcagttgtgatgccactgtctccctcccctgctttatttttttccaaggcacattccatgtatttcactcatttattttcactccctcactcccttagtagaataacatctttaagaagattttttttccttttttttttgttttttgttttttttgagacagagtttcgctcttgttgcccaggctgaagtgcagtggcgtgatctcagctcaccgcaacctctgcctcccaggttcaagtgattctcctgcctcaccctcccaagtagctgggactacaggcacgcgccaccagggcctggctgattttgtatttttagtagagacgggtttctccatgttggccaggctggtctcgaactgccaacctcagatgatccgcctgcctcagcctcccacagtgcttggattacaggtgtgagccaccgtgccggctcctttttttttttttttttttttttttcctgcaatctcagtttctggagcagggcttgtcagcaagtcattattgattaaatattagttgaattaatagattaattaactggccactgagcacctgctatgcactttcctatgctccatggtactggggacatggcagtgagttagatagcctggacctgccgtcataggtctcccagtcaaataggagagacgaacccatcattaggcactgccagcagcaagcactgccagctaatcacagcactgattttgagcaggagtgggacagcttagatttctctagttccaatttagaagtgttcaccattcatgatgctttcttggacctatttaattgtttttcagactgaccgtcttctctccctaggaggcataggcagagggatcagggctgggaaagggaggcccaggggactgtgtgagcccagagggcttcatggaggaggtggtatgtgagcggacagaaatgagcaaggtgtgctcggcagggaaagcagctgtgggagggtctggtgatgaaagtgtggttttggttcaaggaactgaaagatcataaatatggctggggtgggaagaacggtgagagagtaggccaaagaggtcattcagggaagatcattcaaggccctgtcagccacagtgaggagctgagactgtgtactgaggacaccggggagccacagagtttttgagcaggagagggatgtgtcaaattcacgtggaggtcggattgcaaggattgagtggagtctggaagccaagggaggtggctggagtggggacccaggtgggagagactaagtcagagcttgtgggggagggcgaattggagagaccctcacaggaccaagtcgacaaatggttggggtccaggacaaggcccagggctgggggtagtcaaggagagctttctggaggaggaggcaccaaggctgagacctgaaggatgggttcaacagctcttcttgaaatggggacctggggcaggaagatggtaaggacagttggggacatagtaggtgtgggagtctggggacaccttgaaggaggtatctggggggccctggaacctctagagctggagtcaggggaaaggaggaaacaagacagagctttgggttgagaaagagggaattgaagctgtaatgatgggggaaggtccacaggggcctgtccatgtagggctctgtaggacatggtaagaagtttgtcctttgtcctgggggcaatggggagccacagaaggattttgagcaggagtgagacagcttagggtttttaagttccagttcagaagtgtttatcattcatgatgctttttggacctatttaattgtttttcagactgactgacttctctccctaggaggggcacttattttaaagggtccgttgaaataaaagatctaactgctgaaaatgaaaaatcagtttgcaaaaccagtgttctgttccgttttctgtagacaattgatggttcagtccaaagaggtcagaaacaattgatggtttagtccaaagaggtctgtaccatctagtgaaaatcagcaccattaaacatgagaacatttctgttttaaaccatttggaagccccgtgaattttattttattttgttatttttaaaattagagacaggggtctcgctctgttgcccaggctagtctcgaactgctgggctcaagcgatcctcccacttcagcctaccaaagtgctggaattacagatgtgagctactgctcctggccagcctgtggatttgtaaatgtctcctgtggtgtgatctgcctcatgtttcctgtatgtaggcttcagaagcacactctgcattctcagatggcttgaatcagccttgactttttccccaccctctcagcctgaatctcaggttgagatgccattatctgcacccaccctatatgctctgggcttagaactgataccagctggttatcattgtgtataaaagtgtcactaggtatagagagacatctaaaataatctcctctcaaaattttctattctgctgctccatttcttctgctttcagtattttttgagcaattacaatggtctgggccctagagctagaggaataaatcagacacggacatagcaagggacacatatgttgattatgtgtgattaaaatgtatacaagatacgagggcgtacacagatctcaccaactagcatgtttcaagggcttactgtgcttcctgccttccatggatgatctcattgacttcccaacaaatgtgaggttggtattattaatctccacattgttcaaagaatgaaagtgtggcttagagaagggaacctcttttcccagttccacagagctgagatctgaagtctgagctgtgggactctgagacccacccccttaaccattcagagatcccccagccaccaccctccagtgcatataagatgatacccatttcatttgttgttttgagaccgtgtcttgctctgtcgcccaggctggagtgcagtggcacaatcacggctcactgcagccttgacctcctggactcaagcagtggtcccacctcagcctcccaagtggctgggaccacaggcgtaggcatgggctaccacacctagccaattatctttttgtttgtttgtttttgagatggagtttcgctcttgttgcccagactggcatgcaatgatgcaatctcggctcactgcaacctctgcctcccaggttcaagcgattcttggacctcagcctcccgagtagcctgccaccatgccaggctaatttttgtatttttggtagagacgaggtttcaccatgttggccaggctggtctcgaactcctgacctcaggtgatccacccatcttggcctcccaaagtgctgggattacaggcatgagccaccgtgcccagccgcctagccaattttttaagtttttgtagagatggggtcacaccttgttgccccaactggtctcaaactcctgagctcaagccatcctcccgccttggcctcccaaagtgctgggattataggcataagccactgcgccctgccaatatggctaatactggtttatagatgaggccagcagggctcagaagtaaagccccatgctcagcatcactcagcaagaaagtggcagaggtgtgatctgaaccatgagctctccaatttaaagggctgctgtagaggaggaatcaaatctcccactgccaccctcccctgggggtggggtgttcagggatctgtgacccagtgggttttacttcctcctttttgcgggctatggtgtcatactccaaggggggcaggaccacaaggcaaggggactagggggtattctgtgggctgggagagagcacgcttcctggcagtgccctctcccagatgagacctgatctcttttttgttttttgttttttgttttgagacagagttttgctcttcttgcccaggctggagtacaatggcgcaatcttggctcactgcaacctccgcctcccaggttcaagcgattctcctgcctcagcctcctgagtagctgggattacaggcatgcgccaccacgcccggctaattttgtatttttagtagagacggggtttcaccatgttggtcaggctggtcttgaactcccgacctcaggtgatttgcccacctcagcctcccaaagtgctggattacaggtgtgagccactgcgcccgaccgagacctgatttcatctcatgtcataccagcaaggaggcagagcataagtaccaacctggatggggcgcgctgggagccccatggaggttctagggtcctgagaatacaggcattgagacgggctgaggaggaactccagcatccggctgcccgtgcccaccttcagtttcaccctaccctgctcccacaaggatctgagcagggagggggcctgatttccttctcccgctgagaccacagtcctctggaggctaggatctggtgatggggcaccctagctaggagcctgagcctctttataatttagtttccatagaagttatatgtgcatttaaaaaaattcaatgtaagtaaagacctacaatgaaaagcaaccgtcttgtctctgggggtgggatgggggatgcctttgcgtggggagctgttaggagacttgacagtcacctttgctgagagcctcctgcatgtcaggggctcttctatgcacattatatgtgtgctaattccttttttaaaactttactttttgtggagatgagtcctgctgtgttgtgtaggctggtcttgaactcctggcctcacgcaatccacccccaaccttagcctcccggagtgcagggattacaggtgtgagccacctttcccagcctgttgactcctttaattcagaggagtcagtcagattttagacatctcaaatgttgtatgttcaaaaccaaactcctggtcttttccccaaacttgtgtctccctgtcttgcccaatcagctgttgacacctccaatccttgcagttgctgcggccaaaactcagtcatccctcactcctttactgctctcaaacccacatccagcctagaaatgccatcccctccaccttcaaaatgcatccagaccccgccctttcttcgacacttggctgaccacaccctggtcctgtccacccttggctcctgtctggatgctcccagcagcctcctccctgggctcccttgccctgccccagtctgttccccacgcacagccgccaggggatcctgtaacacctgtgtttgtttcttcgggctgctgtaacaaattgccaccaagttggtggcttaacacaacagaatgtatggccaggcgcagtggctcctgcctgtaatcccagcactttgggaggccgagacagtcgatcatttgaagttgcaccactgcactccagcctggataacagagcgagactccgtcttaaaaaaaaaaaaaaaaaaaaaagacaacaaattcattctctcagttttggagccgaagtccaaactcaaggtgtagcagggccatgcgcctccagaagctggaggggagattccattcctcacctctcccagcttctagtggctccaggcattgctgggtttatggccacatcaccctaatgtcagcctccctgttcacatgaccttctgcctgttctatctctgaggacagttgtgattggatttagggcccatccagttagtccaggatgatctcatctcaagatcctaaatctgattacaattgcaaagatcctttttccaaataaggtcacatgcacgtaagttccggggattatgcttgcgtgggacacatcttttttgaggccaccattcaacccactacaaaatccaactgaagcccagcgaagtggctcatgcctgaaatccccgcactgtgcgaggccaaggcaggagggtcacctgaggccaggagttcaagagtagcctgggcagcgtagggagatcctcatctcttttttttttcgagatggagtttcgttcttgttactcaggctggagtgcaatggcgcaatcttggctcactataacttcctcctcctgggttcaagcgattctcctgcctcagcaatcccgagtagctgggattacaggcatgtgccaccatgcccagctaattttttatttttagtagagacagggtttctccatgttggtcaggctggtctcgaactcccaacctcaggtgatccgcccaccttggcctcccaaagtgctgggattacaggcatgagccatcacgcccagtggagatccccatctcttaaaaaaatctgaagcagatcacatcatccttccctgctgggaacccacacgtgaccctgttctactcatcacagtccaggcagccctgcaggatctggccctatcacctctgtgacatctcctctcccactccccccagcccacttcactgcagacacactggcatcctcactcttctccatccacaccaggcacattcctccctcagggcctttgtactgatcatttttcccacagatgtccatctcaccccaccttgaagtttttcttcaggtatccccttctcagtgaggccttttctgacctccttattaaatatcacaaacaattccacccccacccccttccctgatcctctatggcacttactaccttctaacattatatcatttatttattatcttgtttattatcaccttttttttttattttttgagacggagtttcctttgtcgcccacgctggagtgcggtggcgccaactcactgcaacctccacctccctggttcaagcaattcgcccacctcagcctcctgagtagctgagattacaggcgccctccaacacgcccggctaatttttgtatttttagtagagatgggatttcgccatgttggccaggctggtctcgaatgccagacctcaggtgatccacccacatcggccccccaaagtgctggcattacaggcgtgagacaccgcgcctggcctctgtttttccctcgtgtctattttgttcacagctgtatccccagtgcctaaaacaatacctgatgcacacaaggcaaccagtaaatgtgtgtaaaattaacgaacagcaaatgctattgttaccatgcccattttgcagatggagaaaccaagagcacagaggtgttgtcacttctccaaggtcaaacagtcactaagtgcagaagctcagattcaaacacaggtatctggctctagcacttactgtattgtcttgccagtctcatccaatcgaaatcacttctccagtactagtttttatttgtttgttttttatgagacaggctctcactctgtcagctgggctggagtgaggtggtgcgatcactgctcactgcagtctccacctcccagattcaagcaattctcctgcctcagccttccacatagttggaactacacgtccacaccatcataccaggctaattttctttcatttgttgtagagattaggtctcactatgttgcccaggctggtctcaaactcctgggctcaagcaatcctcccaccttggcctcccaaagtgctgggattacacgtgtaaaccaccgtgcctggccctccaatattagtttactttttaatcaaaagttaacacaataagaaaaataatacaattaaaacatcaaaagttaaaattaaactaatcattacagacctgtaatcactgtacaatttggaagccaaaacatcactgacaatttgaacgaagtccatctattttcttcctatttttattttgtttttgtttttattttttatgttcttgtagagactgggccttgctatgttgccaaggctagtctggaactcctgggctcaagcagtcctctcacctcagcctcccaaagtgctgagattacaggtgtgagccacggtgccaggcctttctccttatttttggtttattagtgaccatcccagttctccagccctgacgctgccagccctgttacttcagatctccatgccccaccttgccttcggttttgtttttcttcatcttggcttccctaatttcacattgcctgctgttccaactccatattcttcaataaaaatatgtctcaccaaggccttcaaagaaaattgaagacaagcatttcctgcactccctcctgcctcctccacccacaatgttgtggtcaaccgcctctaagactgatgttatcttctgcttctcctagtgacctctggagtttcaaataaccttagtctgttgctgtttcttgctagatttgtttgtttgtttgtttgtttgtttgtttgagacggagtctcgctctgttttaacccaggctggagtgcagtggcgcaatctcagctcactgcaacctctgcctcccaggttcaagcaattctcctgcctcagtctcccgagtagctgggattacaagcgcccgccaccacgcccagctaatttttacatttttggtagagagagggtttcaccacattggccaggctggtcttgaactcctaacctcaggtgatccacccacctcggcctcccaaagtgctgggattacaggcgtgagccaccacacccgacctgctagatcctttttaggcatccccatttgtcttcctgccatgaaaagaggggatctagcatgttctaccctcgccagtctgggatctgacattggtagggaggagtttgcaagttatccctacaaatctaggttggatcttggagtaaggggagcacctagctctgagagttttctttttcttctttttcaaaaaagagtaatgcgcgcccctgattttttaaaaggtaatgaaactggtgacgcctgtgtttgctttataattatttctcaacctacaccgagatattttctatacttctctgaaaatagcttatgtttcacaattttaaaaaagaaaataggctgggcacagtggctcatgcctgtaatcccagcactttgggaggccaaggcaggcggatcacgaggtcaggagttcgagaccagcctggccaacttggtgaaaccctgtctctactaaaaatacaaaaattagctggtcgtggtggcaggcgcctgtaatcccagctactcgggaggctgaggcaggagaatcgcttgaaaccacaaggcggaggttgcagtgaaccaagattgtgccactgcactccagcctgggcaaaagagcgaaactccgtctcagaaaaaagaaaataggggccagatgtggtggctcatgcctgtaatctcagaactttgggaggccaaggtaggaggatcacttgagtccaggagttcagcctgggcaataagcaagaccccgtctatacaaaattaaaaaaaaaaaaattagctgcggctgggcgcggtggctcatgcctgtaatcccagcacttttgggggcctagacgggcggatcacgaggtcaggagatcgagaccatcctggctaacatggtgaaaccccatctctactaaaaaatacaaaaaaaaaattagccgggcatggtggcgggcgcctgtagtcccagctactcgggaagctgaggtgggcgaattgctcgaaccagggaggtggaggttgcagtgagccgagatggcgccactgcactccagcgtgggagagacagagcgagactgcgtctccaaaaaaaaaaaaaaaagcagctgggcatggtggcacgtgcctgtagtcccagctgcttgggaggctgaggcaggaggattgcttgagcctgggaagttgaggccgcagtgagctatgatcatgctgctgcactccagcctagggaacagaactctggcactaaaaaaagaaaagaaaagaaaagaaaataggcttacaataaaaagcaatcttgacctaccccaaaatcccactcccttgaagacaaccacttctgccctgttgcttctctcagtaatactccttttctgcagttatctcttgacttcctgccatgtgtgtttgggggagcttgagggaagagggtgtccctgtctcattgagagaggtgccaccctgccgtgaaaagaggtgccaccctctgtcaattaggagaggagggatgagagaggaaaggggtctccagtgtatttctccagccggggccttaaatccctcttgggagatatgggatggggtggatcggaaaataaatttttttaaatccctaccaaaatatcagctggctttttttaaaaaatcaaataccaaaatctaaatagactccaacagaaaattcaccatctcctctgaccttttcttcccatctcatgctgtgaactgtcttctgttgactttatcgctacctttcttcattctgttattcaaccatgatctctccgtttcattttataagcgttttattaatttcatttatgtatttatttttgactaggtaatgcatgtccatggtacacaaattcacaaggtttgtaaatgagaaaagacgtgaggttccttttgttctttacctgtggcctccctgccctacacggggactctagggtggaatgtagcaaagcccatccaccagccatgtactaccccccaacccggccaggctggagcgaccgtgtctggggagccgagccccgcttctcgctgcggtgagcccggactggggcacgcactgcgcagactccccgctgcagtgggcggagctcccacaggccccgccccctcctcccaccctcgttcagcctgtccagacagaagctggggcccaccggaggtagctgcagacgcctgagagcgaggccgaggcccctcaggggtaggtggggggaggctggctggggggatgggcagcggggtggcagggaggccccgatgatccctggctgagctgtgtggtgtgggggcacctgagggcggaggagccacctagaatataccccctgtcccagggctgagaaaagccaggcacaaagacctggggctccgctgacctcatccagcgctgcctttcttggggtgtctacaggttggaggagggagaagggggctgctagaggggagctgcgtgggtgctgatgggggcagggtgggcactgcagagtgaagagcaggcagcagagcgttggattttgagggatttcgaaatcctgctgaccagtgaccagcttcctctttttggggtggtgggcagtgtgccagtggcccccatgattatgaatagccccaagactaatcactcttctgtgatgtctgtccctggaaagcgtagaacaccccacacagtgcccacttttgttctgccagtttggagaccctgacacacccaccttctcacctgggctctgcgtatcccccagccttgagggaagatgaagcctaaactgatgtaccaggaggtaggtggattggggggctcagcagggtggaactgggtacagtgggggtgggggttcccaagagccacctgtcacccccgttgttgtccccatccccagctgaaggtgcctgcagaggagcccgccaatgagctgcccatgaatgagattgaggcgtggaaggctgcggaaaaggtaggagccctccgccaccctcgctctgtctcagagacaggctgggctgcccccctcgggctggctgaccacctcctcctccccacagaaagcccgctgggtcctgctggtcctcattctggcggttgtgggcttcggagccctgatgactcagctgtttctatgggaatacggcgacttgcatctctttgggcccaaccagcgcccagccccctgctatgacccttgcgagtaagtggggggtgctgcagttggtgggggaggggcctgccagaccaggtacacttaagcacacactaaacagggcctgcactcagccctacccagcgcttgcgacaagtgaggaggttgcaggctcccaagtgctcgcccgccccctcctcctccacacacatagtttctatggcagccacagcgtcatcttctgtcaggcctgtgaacagacacagcatcttccacccacatctgtggacccacacacacatctcaatacacgaccttccttccacacctctagacagacacgcagaggatcatgagtccaggcacgcattcaaatacacacagttttaaaaaattttttttaaaagaaaagaaaaactcaaatacagtttagctgggcttggtggctcacgcctgtaattgcaacactttgcggggctgaggcgggaggattgcttgagcccaggagttccagaccagcctgggcaatgtagtgcggctccatctctactaaaagtaaaaaaagtaaccaggcatactggtgcacacctgtagtcccagctactcaagaggttgaggcgggaggatcgcttgagcccaggggttcgaggctgcagtgagctgagatggcgccactgcgcttccagcctgggggacagggcaagactctgtctctaaaaaaaaaaaaatacagtctatccaacacacccatggacggacagctgagcactcacctcccagcccttgctctccggcaccgtatggctgatagcatcccccaccccccagagcagtgctggtggaaagcattcctgagggcctggacttccccaatgcctccacggggaacccttccaccagccaggcctggctgggcctgctcgccggtgcgcacagcagcctggacatcgcctccttctactggaccctcaccaacaatgacacccacacgcaggagccctctgcccagcaggtacctgcaaccttggccctggccggcagcaggggcagggggtgggaggcagcgggggctgtggggaatgaaggggtttctcctgcagcccaggagacagaggggtgtgtctcacacagcagattggacacaggtgtttgcaagcagctgtcgtcacgtggctctctggactgggggcgtttgtcacggtcatctgtaggcctctgaatgtcagggtgcgggtttggttacaagggattattaggctggcagatgtcactcacccacaagctgtcctgacccagtcacacaaagaaagggaagagtggagtaattaacagcccagcctcaagacaggggccacctcccagctgtgtgaccccaggcaggccacctcttctctccagcttcagtttctttatctgtaaaatggggccaatttatagcacctgcttcttagggctcttgtgaggatgaaatggactaatccatgcaaattttagcacagtgcctggcacagagtcagcctttgtgagtctgctgttactatatatcctggtatggtctgcagacaaacttaaagaacataaaagcttcacaatttgaaaaggaacagcctacatggataacctcttccattgaaaaaccatgaatttgttccttctgttttcttctccctactggctctttttgtgagaagttgtcttaaaacttaactaaaattacaaggctccttaagaactgcctgaaaaaaataattatggccaagtgtggtgattcacacctgtaatcccagcactttgggaggcctagacaggaggatcactggagcccaagagttcgagactagcctgagcaacatagtgagacccgccccccacctcccctcaaccatctctactaaaaataaaaaaaaattaggagggtgttgtggtgcatgcctgcagtctcagatactcaggagatggaaggaggaggatggcttgagcccaggagttggaggctgcagcgagccgtgatcatgccactacactccagcccaggcaacatagcaagaccctgtctcaaaaaaaagaaaaagaaaaagtaataataataattacaaaagttaaaaaccaaagccaggcatagtggtacacacctgtggtcccagctacttgggaggctgaagcaggagaatgacttgagcctaggaattggaggctgcagtgagctgtgatcatgccactgcactctagcctgggcaacatagtgaaaccctgtctctaaaaaaaaatttttttatgttaaaaaaccgtatgagctcccactccctgctggctccctctaaagtggtttaaaacacagatgtaggaggcagatggtctgggttcaaatcctgctccatagctggatgtggtggtgcactcctgaggtactagctacttgggagactgaggcaggcggaatgcttgagcccagggattgaagatcagcctgggcaacatagcaagtccctgtctcaacaaacaaacaaacaaaaaaacaaaaacaaaatcccactccactactgagttctctgtggggattataattaaaccagcctcactgggttgtgagaattcagtgagttcgctgagaagaggcctagaacagggcctggcacacagtaggttccagggcatccttgactgttgctgttgttggcatcatcgtgcctcacccgataccttccaggaccccctgcctgagcctcgcccccaccatactgggagatgcctggaggccctgccttgatgctgaattttgagaaagtccctggaggggcaggaggggtcaggaggacttggagggggatcacagggcaactaattattaaagcagataaagatgtttaaaacagataaggaagtcttttaatattttaatctgtaaagtctttaatctatgcaggctaatgtaaagtctgtttactcctaatcatgtctcaaaataactccaccgggcattaccttgtggggttggagagctggctggtccagcccctcagaagctctcccctccccgcagggtgaggaggtcctccggcagctgcagaccctggcaccaaagggcgtgaacgtccgcatcgctgtgagcaagcccagcgggccccagccacaggcggacctgcaggctctgctgcagagcggtgagctggggcccaactggggctggtctgggcctgggggtacccagcctggcccctgatctctgcccctgctggtcacaggtgcccaggtccgcatggtggacatgcagaagctgacccatggcgtcctgcataccaagttctgggtggtggaccagacccacttctacctgggcagtgccaacatggactggcgttcactgacccaggtctgtctgcaccctgtctaccttccttccaggccactccctgccccacagggcacccagcctccgactgcatccctcactcaatccagagtcctctccacccattctctgtaatggcttccttcttgcctcctaccaggcctccctaatccaagccatgcacggtggctcacacctataatctcaacactttgggaggccaaggtgggaggattgcttgagcccaggagttggagaccagcctgggcaacatagtgagaccccatctctaccaaaaaaaaaaaaataagcccggtgtggtggcacacacctctggtcccagctccttgggagactgaggtgggaggatcacttgagcccaggagtttgaggctacagtgggttgtattcatgccactgcactccagcctgagtgacagagtgagaccctgttacaaaacaaagaatccctaaatggagccctctactgccctccccctgctcctggaagcctggggctccctctgatccccaattgcagctaccagcccctctacatggcattcaagaacctgcgcacccatttgatcttcattgtacatctctgtgtgcctgctctaagtccagccctatcctgggtaatgttgggaacatggtggtaacagatggacctcatggaactcccagcccaatgcagactggcctgtcacctgacagtgacagcccagaggggtcagggccggggttggggagacacaggcagagggtcagggccaggatggagggaacagagggctgtggaagctcagagaccccaacctggggcattggagggtttcccaaaggaggtataactaatctgatccctgaaggatagggaggaattagcgcaagatggaacaggaaacagcttgggcaatgaggtgaagataagacaggacaataactcatgaattcatttcctcaacagatagttcccctaacctttaatctcagcaattatgcagggagatgctgtagatatagctgtgactgagacatccctagtgcctgtcctcccagcccaatgggaagaccagtttgtcaccagaaagaatgaggagggaatcccaagggactgtgagagcccagaggaatgcctggtgcaggctgggtagtcatgggaggcttcctgaaggaggcaacatgtcagcctagacctaagaatgagtagaagctagctcagtggagggtagaagcaacagcagattgcaaacgttcaggaaacctggagctttggaataactgattttcatcaaaacttaagttgataatcattctaggactttagctattggagctggggtggagggggtactgtgggacagggggaaagacagagaccagactggggagtgtccctgtcatctgtgagcactaggccgctatcgctgagctcagcactgccctcctacaggtcaaggagctgggcgtggtcatgtacaactgcagctgcctggctcgagacctgaccaagatctttgaggcctactggttcctgggccaggcaggcagctccatcccatcaacttggccccggttctatgacacccgctacaaccaagagacaccaatggagatctgcctcaatggaacccctgctctggcctacctggcggtgagtctggggcaagtggggcctgtcatgtcccagccccatgccgtcactcacagcctccatctgtccctgtttggtgatgacagggagggcgtatcctgaccatcagttctcaccccagctcattctgcttggtcaggggcctggagtagttcccaacatccctcggcctctatttcagttagaaaatgggtattgtttccaacctgttagggctgctgggagaggtaccctgggttcatgcacaccaaacctttggtgctctatatcatccagtatagccacaggtggctctttcagtttaagttaattaaatgcaattaacaattcaggccaagtggggtggcttatgcctgtaatcccaatactttgggaggttgaggtgacaggatcacttgaggccaggagtttgagaccagcctggacaacatagcaagactccatctttacaaacaaacaaacaaacaaacaaaactagctgggttgggttgtgcatgcatgtagtcacagctacgcaggaggctgaggcagggggatcacttgagcccaggaaatctaggctgcagtgagccatgatcacaccactgtactccagcctgggtgacagcctgtttcaaaaaaaaattgtttcaagccaggcatggtttctcatccctgtaatcccagcactttgggaggccaaggccaagatgggaggatcacttgaggccaggagttcatgaccagcctgggcaacatagggagacatcatttctttctattttttttttttttttggtcttattatttattgttctagataggatacccaagaactagggagacaccatttctacaaaaacataatattaattaaaattagccgggtgtggttgtgtgcacctgtagtccctggggaggctaagacagggggatcacttgagcccaggagtttgaggctgcgtgagctgattgtaccactgcactccagcctgggcaagaggctgttgccctgtctccaaaaaaagaaaaaattcagttcctcatgcagtagccacatttcatatgctcagtagcacctgtagcaagtgaccaccatattggacatttccatcactgtgacaggctctgttggacaacactggctctcgccatggcagatactgatcactctggacaaggcactgatgtttctagctcttgatagtttcactagttgaggcaggcaacccaggtctccctaggtccccctgagcaagttacctgtccaagcccagagtcatcgtggaaggcacaaccctaaggcgtggacgtagggaagtgtgactcattggggtctttcactacaagggcctcccgcaggggatcaaggctctcctcattaccacttccccttttagagcctcagtttccttgtctcttgagcattaaggaagatggggggccaggcacagtggctcatgcctgtaatcctagcattttgggagtccaggatgggcggatcacttgagctcaggggttggagaccagcctgggaaacgtgatgaaaccccatctctaccaaaaatacaaaaattagcctggaggggtggcgggcacctgtaatcccagctactcgggaggctgaggcaggagaatcacttgaacccaggaggtagaggttgcagggagccgagattgcaccattgccctccaggctgggtgacagagtgagactccacttcaaaaaaaaaaaaagggggggaagcgggggagcgggggaactgggaagagggcctggtgaggcactgggcacccgaggggttcccagtcaaggcaggctgtgagcaaatcagggaagaaagtgactcgaggctgggcacagtggctcacgcctgtaatcccagcactttgggaggcctaggcaggtggattgcctgaggtcaggagttcgagacctgcctggccaacatggtgaaatcccatctccactaaaaatacaaaaaaattagctggctatggtgatgtacgcctgtagtcccagctacttgggaggctgaggcaggagaatcgcttgaacccaagaggcagcagaggttgcaatgagctgagatcatgccactgcactccagcctaggagacagagcaagactccatctcaaaaaaaaaaaaaaaaaaaaagacttgagcagaggtcctcaaactgagcatgccccagaatcagctgggcgggcttgttaaaacccagattcctggaccccaccccagcactctgattcagtaggccatgtgcagtgaggcccaggaatttgcatttctaacaagttcccaggtgatgctgttgccgctggatcagggaccttacgttgagaagcactgggttagagcataaattctggaaccagacagcctgggttcgaatcctggctccatttatctgctgtgtgactttaagtaagtcacttaccctctctgagcctcagtttcctcacatgtgaaatggatgtggtgattgaccctcttcttcatggaggctgaggatttggtgagatccacagtacctggcttgtggtgagctgtccgtatgtggggtccgttgtgacgatgaccctggcagggcacatgtcttaactgtcccctcgccctcagagtgcgcccccacccctgtgtccaagtggccgcactccagacctgaaggctctactcaacgtggtggacaatgcccggagtttcatctacgtcgctgtcatgaactacctgcccactctggagttctcccaccctcacaggtactgctgggtgtggagatagggagccgctgcagttggccaggagacgggagagggaatcatggagaccagaaagctggtgggggctccaggcaaggggacagatggaagagaagctgcagggagagacagtcaccaggaggtgaccggaagaaggtatctaggcacttgagacaggagaaagagagattacagaggagacagggatgaggtttcaggacaaggtttgagggaacagagaaaaggatgagagggccgggcgtggtggctcacgcctgtaatcccaacattttgcggggctgaggtgggtggatcacttgaggtcaggagttcaagaccagcctggctaacatggtgaaatcccatctctcctaaaaatacaaaaattagccgggcgtggtggcacgtgcttgtaatcccagctacttgagaggctgaggcaggagaattgcttgaacctgggaggtgaaggttgcagtgagttgagatcgcgccactgctctccagcctgtgcgacagacagagcaagactctgtctcaaaaaaacaacaaaaaaaaagagaaggctcagaatattggggttgagggcaggaagcctgaggcaggggtgcaggatgtgggatttggggaggtaggaggcatgggctggaaacaggatgaggggcttgggggatggggactaaaagtatttgggtttagggtagcaagcttggggatttgtgatcctgggataagaaggataacaaccggccggacgtggtggctcacacctgtaatcccagcactttgggaggctgaggcgggtggatcacgaggtcaggagatcgagaccatcctggccaacatggtgaagccccgtctctactaaaaatacaaaaaattagccaggtgtggtggcaggcgcctgtagtcccagctacttgggaggctgaggcaggagaatcgcttgaacccgggagtcggaggttgcagtgagccaagatcatgccactgcactccagcctgggcgacggagcgagacaccttctcaaaaaaaaaaaaaagaaaagaaaaaaaaaaagaaggataacaaccatacccactgcaacatccaggtggatgatggcacttgtggggctcaaagaaggtattctaggggcagtagataagacagtgggtccaggcatggtggctcacgcctgtaatcccaacactttgggaggccgaggcggaaggatccctaggagtttgagaccagcctgggcaacataatgagaccccgtctctatagaaaaattggaagattagcccagtgcggtggcactcacctgcagtcccagctactcaggagactgaggcaggaggatcacttgagcccaggagttggaggctgcattgagctatggtcgtgccactacactccagcctgggtgatagagcaagaacctgtctcaaaaagaaaaaaaagaggatggaccgggcacagtggctcacgcctgtaatcccagcactttgggaggccaaggcgggcagatcacctgaggtcgggagttcgagaccagcctgacaaacatggagaaaccccgtctctactaaaaatacaaaattagccaggcgtggtagcgcatgcctgtaatcctagctacccgggaggctgaggcaggagaatcgcttgaacccaggaggcagaggttgcagtgagccgagattgtgccattgcactccagcgtgggcaacaagagcgaaattccacctcaaaaaaaaaaagaaagaataaaagaggatgacaacactgggttttggggagcaggaatgggagccacagccaggaagaggaaatagggatgtgggatttatggagacaggaacagggtctgggagccagcgatgaggaagtcctctcaatagctaaagcagggcccaggcttggttccccaaagctgagggcaaagcctgtggacacagccgccctctgcatcctgccccacctcctatacacccgtcctcaggttctggcctgccattgacgatgggctgcggcgggccacctacgagcgtggcgtcaaggtgcgcctgctcatcagctgctggggacactcggagccatccatgcgggccttcctgctctctctggctgccctgcgtgacaaccatacccactctgacatccaggtggtaagtactgccccaagccaccccttggcccctgtgtggggcagtcctagggacacagccctcatgggactcgtctgtcaatgacaagggcagcccagagtgagccctgtcactgtggggaaaccatgggtcagggccagggtcatggggcacagggagaggggccaggaccgggatgagggggcacaggcagaggggttgggaccgggatgggggtgcagagagaggtgttgggaccaggaatggggacatgggcaggtagaggggtcagggctgggattgggagcacaggcagaggggtcagggctgggatggggaggcacaggcagaagggtcggggccgggttggagggcacagagagaggggttagggccagggttgggggcacaggcagaggggtcggggccaggatggaggaggcccaggcagaggggtgagggctggggtggggggcacagagagagggtttgggaccaggactgggggagtgggcaggtagaggggtcggggctggggttgggggcacaggcagaggggtcagggctgggatggaggaggtacaggcagaggggtcagggctgggatgggggggcacaggcagaggggtcagggctgggatggaggaggcccaggcagaggggtcagggccagggtcggggggcacaggcagaggggtcagggctggggtggggatgcccagaggaagcctctgccctagcgggaagggccaaggaagatgttctggaaatgggggcatctgagatgagacctcaggaatgaacaggagccattctgccgggaacagtgttttgcaaatgagaccaccggggcctccctttcagctttcgttctcagagggcccctccacctggccctgttctggcccccgaggattctgtgggaagcagtggagtcccacagatctcgctccacactctgctccctgatcccggggctcctccgactccccctgcctctcacactccttcccatcctcccctcccactcagaaactctttgtggtccccgcggatgaggcccaggctcgaatcccatatgcccgtgtcaaccacaacaagtacatggtgactgaacgcgccacctacatcggtgagtgtcttgagcaccacggggcgctgaagaagagggggttcagacaccaggggcggccccccgagggtgcccttatgctccacccattcctctctaggaacctccaactggtctggcaactacttcacggagacggcgggcacctcgctgctggtgacgcagaatgggaggggcggcctgcggagccagctggaggccattttcctgagggactgggactccccttacagccatgaccttgacacctcagctgacagcgtgggcaacgcctgccgcctgctctgaggcccgatccagtgggcaggccaaggcctgctgggcccccgcggacccaggtgctctgggtcacggtccctgtccccgcgcccccgcttctgtctgccccattgtggctcctcaggctctctcccctgctctcccacctctacctccacccccaccggcctgacgctgtggccccgggacccagcagagctgggggagggatcagcccccaaagaaatgggggtgcatgctgggcctggccccctggcccacccccactttccagggcaaaaagggcccagggttataataagtaaataacttgtctgtacagcctgtgcctgactgagtggtgtgagatggggtgcaggggtaggggacagctggcatgggcctctggtggggacatctttttgtgctgagccctcaacatgtcactggcatgtgctgagccctcagtgtgtgaccagtgtgggttagcatgtactgagccctcagcatgtgctggcatgggttggcatgtgctgagcccttaacatgtagtgtacatgggctgacctgtgctgagcatgcagcgtgccaccctgtggcccggcatggacttagcactcatgtagccagcatgggtatgtgctgcagagaagcatgttcccagattgatcagcagggaccaaaccattgccacatcccaagggtgaacaagcatggctgagcaccagagtgtgcaccaagtgtgaatttaggcctgccaagtggatttacacccagcacgtcccaaatgtgggtgagtgcatgccaaccctgtaaacatgtaggaaggacaggtcaacagacaaggagaccccagcatccggcaaacttgattaacacatactgaacacagcatgttctgagggtggattcccaacacgccaagcacatagcgtatttaggacaagggttagtcaaccaagcacagcttttccctcctagtgtgacagcagcccaggctcccgcctaagccagtggtcaactgggcccagcatcgcagagcaagtcactgggtgccagcctggagcccccattccccccagggccagtccaagccccaggcagtgagagcaggcttgaagcaggactgctgaacagttctatattgaaatagacagaggcagcagggccaagggcgagcgcagggccagcggggtgcagccccctttcctgctgtccttctggccaaggagcatgggccagactccaaagccctgctgtgtttaggagaggtgtgcaggcacgcaccgcaccgcagacggggaatgagaatttctggataactatctttctgtaagaataatttgtgggttcaggagatggctctgaggagcagttcaggttgggagggaatgccagcccagctagcgcagcccccagtgatgggcaggggtggaatcaccatcagtggtgcccggtgacatgctggaggaagctggtggccccccggggtggaccatgctggtgggagcggcggggtgggagcccctgagcccgtgggcccctgacgctctccagggtgcagtctggctcactcagccattctccaggacagctgctggggtcgaagagctcagggtctggcctctgtgggggaagagagaggggcatcagccaagcagtgttagtgtattagtgtctgctgagcctctgtcacctcctcctgatgagggtgagcatgtgctagggtcttaccagtgctgggcctttattgcccctttgtagtgatgtgatgacagctcactgcagcctcgacctccctggctcaagtgatcctcccacctcagcctcctgagtagctgggactacaggtgcatgccaccaaaaccagctaatatttctaattttttggtgcagacgggatctcactatgttgcccaggctctttatcaagcttcttataagtagattactgtgccctgagtttttgtcacagcctggaagtagctgagtaagtgctgagccttatcatatcttgacggtattaggtgtgtgctgagcctcctaagtccctaattgtatcctgaacatgggtgagtgtgtgttgagcctcctcacacactaatcatatcctgagcacgggtgagtgtgtgctgagcctcctcccaccctaatcgtatcctgaacgcacccggctcacctcagcttccatggtcatgttgtcaatgttgggcccatcctcatctcgctgcaggatggccagtggctcagcagaggccccgagatgctctccttcctcccagctgctgccccggcagggcctgtcatcctcaggcgagacctggctcagccgaatgaggttgctgaagttggagtcggacttggaacccgcaggtggcttgcgggccttgtggcggcctgccaggcggctgctgtagaaggccaggatgggctcagggcccgagtcgggcacatggtggccagtgatggctgccttgagggggaccatcatgtcggagaccgcattggtgcaggtctcaccccacagcccatgcccagcctcctgcagactcaggtcatccagctggtcgatggctctttgcatacctggtgccttctcctctcggaagaaggggctgctgccggccacactgcccatacccgcagcctccttctcctcagccagacagtagtagggggtcccatcttctgcggccacgacgggcgtggggggcttcccctccacttgcagcgagaggcggtagctgcgcagcgagagctggtagtagtgggtggtctcgtgggcactgcgcagctgctgcatggacacgaaggggtggcgcagggcagcactggggctgatgcgttcgtgtgactcccaggtcagcatgcgcttgatcagctccaccatgctcttgaggtcggcgtgctccgccagcgcctcccggtcagggaaggttagccgactggccacactgccaccattcactgtctcaatctggtccaacgacttgagcatatacttgcggcgctccaatgggcgcacctggcggggcatggagaagggggcagggttgaccattgtgcagggctagggccctgggcactcctgctgtggcacccacatgtagccccgacttccaggtctgcccatgatctgccttggagctctctggctgctaggagggccaccctggatccgtcacacccaagcccctctaatcgaacccaaatcactggcccaagttccaccccttgccccagacctccagtccccttcagcaccatgggtgcagcccctaccagcagctagcagaagggctgcccggaatctctagtcctccctggaatcaaatccaggtccctcttactgccacagctccacacttgatcccaggcctcctggtggtcaaacccagacccttcttgctatagtagtttgtcaccccctgctattaaactgccattgacttttagtctcacctgtggtcccatccagacccttcttgctgtgaaatcaagacctatgacctcaaactcctagtcccctctgctgtctaacccaggctcttgctgcacagatgggaggggcaaagccacagaggtagcagactggctgctgccccaaacctctagactcacctgaggtctcactcagatccttttttttttttttttttttttttttttgtatgtgtgtgagacagagtttcactcttgttgcccaggctggagtgcagtggtacaatctcggctcactgcaacctccacctcccaggttcaagcgattctcctgcctcagcctcctgagcagctggaattacaggtgtccaccaccatgcccagctaatttttgtatttttagtagagatggggtttcaccatgttggccaggctgttctcgaactcctgacctcaggtgatccacccacctcggcctcccaaagtgctgggattacaggtgtgagccactgtgcctggccttagatccttttttttaaacagggtcttgctgtgtcgcccagactggggtgtagtggtgcaatcatagctcactgcaactgccaactcctgggttcaagtgatcttcccacctcagcctcccaagtagcttggaactaccggtgtgtgccaccatgcctggctaaattttaaaaaaaattttttctagagacacggtcttgctatgtcgcccacaatgacttcaagtgatcctcctgccttggcccccaccaaagtgcgtggactacaggcataagccactgcacctggcctctctcgcaattctcatagccaatctcagacctcatatattctctgtggtctaatccctcttgccacacaagttgctgaccccggagctgaagctggcagagaagctgccccaatcgtcctgtcacacttatagtatgacccagatctctcttgctagagcagcccccacatctgacttccaaacatctaattctccctgcagtttctcccccagatctatcttgctgcagttgctgaccagtcccacatttgatctcatgcagctctttcttgctgtgaaaatgccctaggctgacccccaagttccagtcctcattgaggtttagcccagaaattttttttttcaattattaaaaaaatatttttttggccgagcgcggtggctcatgcctgtaatctcactgctttgggaggtcgaggtgggtggatcacgaggtcgggtgtctgagaccagcctggccaacatggtaaaaccccgtctctagtaaaaatacaaaaaaattgccgggtgtgatggtgggtgcctgtaagcccagctactcaggaggctgaggcaggagaatctcttgaacctgggaggcagaggttgcagtgagctgagaccgcaccactgcactccagcctgagcaacagatcaagactccgtcttaaaaaaaaaagaaaaaaatatttttcttttctttctttttttttttttttttttgagacggagtctcactctgttgcccaggctggagtgcagtggtgggatctcggctcactgcaacctccgccctctgggttcaagcgattctcctgcctcagcccgccgagtagctggaattacaggcgtctgccactgcgcccagctaattttttgtgtttttagtagagactgggtttcatcatcttggccaggctggtcttgaactcctgacctcgtgatccacccacctcggactcccaaagtgctgggattacaggcgtaagccaccacacccagcctctgttttttgttcttttcactccattcttctggtctgatagatttttctttttgaaacagagtcttgctctgtcacccaggctcaagtgtagtggcatgatcatagttcactgtagcctggacctcccaggctcaaggaattctcctgcctcagcctcccatgtatctgggacaataggcccataccaccgtgcccagctgatttttttttccatgttttataaagaggaggtctcactatgttccccaggctggtctcaaacccctaggctcaagggatcctcccaccacagcctcccaaagtgctggaattacaggtgtgagccacgttgcccaccctagaattttttttcatgtaacagcccccacactgactgccctcacccaacttttcccttaccttcgtctcggccaggtagtcagccgaggacttgagctgccaggggttggcagcgtcagggtgggggttgcgcttgaagaagtggtgggccttgcaggcggcgtgcaacaggtgtggcttgggcaggccctgggtttcgcagatgtagcgcacctggtcgtactcgttgttgccggggtagagaggccagcccaggtgcagctcagccatgacgcagcccagggaccacacgtccaccttctcgcagaagggcagccccagcaggatctcaggggcccggtagaagcgcgactggatgtatggctccttcacgtagcgcacctcgctgaaaatgctggcggatccgaagtcaatcacctgtcgggggtggggaagagggcgagtgggcaggtcaagcagcagggacagccgagctgggccaccccggcatctttcacctggcatcttcctgcatctgctatttgactctggccatctctgggtctgtgattctttagttgctttgttggtttttgtttgtttgtttgtttgtttgtttgagacagagtctcactcttgttgcccagtctggagtgcaatggcacgatctcagcacactgcaacctccacctccccggttcaagcgattctcctgccttagcctcctgagtagctgggattgcaggcgcccaccaccacacccggctaattttttgtatttttagtagagatggggtttcactatgttggccaggctggtctcgaactcctgacctcatgtgacccacccgcctcggcctcccaaagtgctgggattacaggcgtgagccaccgcacccagcctttgttggtttttttttttttttttgagaccgagtctcactctgtcgcccaggctaaagtgcagtggcgcaatcttggctcattgcaacctctgcctcctgggttcaagtgattctccagcctcagtctcctgaatagctgggtctacaggtgcacaccaccatgccctgctaatttttgtatttttagtagagacggggtttcaccctgttggccaggctggtcttaaacttctgacctcagatgatctgccctcctcagcctccctaagtgctggaattacaggcatgagccaccgcacccagctgtggccgtagttgttaagtccctatctctgtctcttccagcctttgtgtctggttcgagtgactgactctgtctctgtttctctccactagaactatgcaaaggagggttaggaccctattcttcctcttgcaccccacaccttgtccatcagccaacagatctagaatctgctccctctgcatgccatccacagccccgaccctggtcctatcctgcatcctttccaacctagaccaacgcgggggtctcctcgctggtctccctgctcctctcctctgccccctagtctgtctgtcacaagcatccagagggatcctgtggccgcccgggatagattgggtcctcccctgctcatagccacatcctgtgacaaaagccaaagtcctcaccgtggcccacaggtctccaatgtctgctctgtcacctctctgccacatctcccactctccccatcactcaccctcctccagccacaagggtctcctcactattccttgaacaagtcagacattcccagctcagggcttttgcactcgctgttccctctgcctggaatgctcttccctgcatgagcacagggctccctgcctcacctccttcaggtctttactcaaatgtcacctttctatcaaaaggtgaaaggcaggacaaaaaaaaatgatcaccttctcagtgagaccttccctaatcattctgtgaaagcatcagccatcagtccccatcctttctatcccccgccaggcccctgtttttctttttcttttcttttcttttttttttttttttttttttttttgagtcggaggtttttgagacagagttttgctcttgtcacccaggctggagtgcaatggtgcaatcttggctcactgcaacctcctcctcccaggttccagtgattctcctgcttcagcctcccaagtagctgggattacaggtgcacaccaccatgcgcagctaatttttatatttttagtagagacggggtttcacgatgatggccaggctggtctcgaactcctgaccgcaggtgatccactcgcctcggcctcccaaagtgctaggacaggcgtgagccaccgcacccaggtccaccattgctcttaatgccatttcacacactatatctcttaattttttattttaattttattttttaattatttatttttttgtgacggagtctcgctctgttggccaggctggagagcagtggtgtgatcttggctcactgcaacctccacctactggattcaagtgattctcctgcctcagcctcctgagtagctgggattacaagcgctaatcttttgcatttttggtagagacaggcggggtttcaccatgttagccaggctggtctcaaactcctgactcagatgatctgcccgcctcagcctcccaaagtgttgggattacaggcgtgagccacggcgcccagcccttttttcctttttagagacagggtcttgctctatcacccaggctggagtacagtggcaccatcgtagctcactgtagccgcgaactccagggctcacaagatcctcccgcctcagcctcctgagtagctgggaccacaggcatgcacctccatacccagctaattttttaactttttgtagagatagagatgggtctcactatgttgcccaggatggctcctgggctcaagtgatcctcctgcctcagcctcccaacatgctgggattataggcatgaggccctgcacctggcctctctcagcatttctctccccagcgaggatgtcagtcccacgagggcaaagaatttatccattttgttcaatactgtatccctagatgcctagaacagggcttggcacacagcaggggctcagtaaataatgagtgaatgaatgaatgtatgtatgggctttgagttccttcattctctttccatctcttgcttgtatctctctctctctgtctctcatttgagacagtggctcaccctgtcacccaggctggaatgcagtggcgcaatctcggctcaaggcaacctccaccttccacgttcaagcgattctcctgcctcagcctcccaagtagctgggactacagtcacatgccaccatgcccagctaatttttgtatttttagtagagatgggttttcaccatgttacccaggctggtcttgaactcctgggctctagtaatcctcccacctcggcctcccaaagtcctgagattctaggcatgagccactgtgcctggccatttgtacctctcgttctttctttgcaactgcctctccatcacttgcctgtctcttgtctctcagtgtctctctctctctttccatctctgtctctgtgtcgtccactaggaagacacctccctgaagtcccggtcctcttctgtcttcctcttcaggcactgttcacactcgtcacaggcctttgacacatgacaggtgcttggccaacagctgcggaaccaacattgcgaatggccgaaagcctttgtctctccccatgcctctggtggagctgtctgccattttcaccctgaatctccgtgactctctcttggcctgtttctttttctttttctttttcaggtggcttcactcttttgtccaagctggagtgcagcggcatgatctcggctcactgcaacctccgcccccatatgggttcaagcgattctcctgcatcagcctcccaagtagctgggattacaggtgcaccccaccacatctggctaagttttgtatttttaatagagacaggatttcaccatgttggccaggctggtcttgagcttctgacctcaggtgatccacctgcctcagcctcccaaagtgctgggattacaggcttgggccaccacacctggccagcctgtttccttctctgagtttttctgcttttcattcagccatttctcagttttttgtttttgttttgtgttgagacagagtcgagctctgtcgcccaggctggagtgcagtggcgtgatctcagctcactgcaaaacctctgcctcccaagttcaagtgagtctcctgcctctgccccccaactaactgggattccaggtatgtgccaccacgcctagctaattttagtttagtttttttttttttttttctgagacagagggacttcctctgtcgcccaggctggagtgcagtggcgtaatctcagctcactgcaacctctgcctcccgggttctaagcgatttatctgcttcagcctctggagtagctaggattacaggtgcccgccaccacacccggctaatttttatacttttagcagagacgaggtttcaccatattggtcaggctggtcttgaactcctgacctcaggtgatccacccgcctcggcctcccaaagtgctgggattacaggcgtgagccaccgcacctggccatccctcacctttcacttgcagaaagcagtatcatgaaatggttattaattgctattctgatcccagagtgccagggcttcagtacccaagaggctgagtgaccctgggcacttagtctatgtttgtggaatgaattcattccttccacagagacagtgggggtgataatgccggccaggtgctgtggatccgtcctgtctgtcccctgctgtgtttgtggaagtccctgcttccctgggtctctgtccttccacctcttggggcagaataatccacctttttctgtctctgtgtctctggcaagcattcatttagcactggctccatgactgcagtgctgggagatgtcagggacacagcgatgattaagtcagccccagccttgccctcagggtgcccctggttcagaagcatccagacagtatcaaactcaaaagcagacagaggactgggcatggtggctcacacttgtaattccagcactttgttgaggccaaggtgggcagattgcttgaactcaggactttgagaccagcctgggcaacatgatgaaatcctgtttctaccaaaaaacacaaaaattggctgggcgtggtggctcacgcctgtaatcccagcactttgggaggctgaggcaggtggatcacaaggtcaggagtttgagaccagcctggccaacatggcgaaactccatctctactaaaaatacaaaaattagccgggcatgggtggcgggcacctgtattcccagctactcaggaggctgaggcaggagaatcgcttgaacccgggaggcggaggcagtgaaccaagatcatgccatcatcaccccgtctctgataagtacaaaaaaaaaattagctgggcgtggtggcgcatccctgtaatcccagcaactcgggaggctgaggcaggataatcacttgaacccaggaggcggagttgcagtgagctgagattgtgccactgcactcaagcctgggtaacagaatgaaactccgtctcaaaaataataataataataattttaaaaaattaaaaaaaaaatctagggctggaagaagctgggaaaaagacaaggaactagggacgcagccaccctagacgacccctactcaccttgaccctgaaggggcagcgggtctggtccaccagcatgatgttctcaggcttgagatcagcgtggatgatagccagctccttgagccgggccagggctgtgagcacctgcagggtgactgtacggatgtggcgggcggggaggggcgcgaagttgttctccttctggaactcgaaaaggttttgctccagcagctcaaagaccaggtagaacttgagggcgtcatggaagaactcaaggaagcggatgacgtgggcctcttcagggtctaggcctcgcatgcagtgcagcagcttcagctcgttcttgatgatgcggttgcggtaggcgtcattcttgaggatcttgatggccaccatctcgcccgtgctccgccgccagcccttggctacctccccgaaggtccccttgcccaagacctcgatgatgtcgtagcagtcagtctccgactggatggtggacatggtgccgctgctgccagacaccgccctgcccaggcccctgtaccactggctctgccgcccaggcctcccgcctggctgctgacacagcaggccccccagtgggggaaagagaaccgcactcgtgtctcctcctatgaggttggcccctgcttccctggcacccccaaacccccaggccacactgtcagtctgccaggggctgcacccctccccagaaaccctcctggcttgggatgaggggccccaggccccaccgaatgggttccagcgctgttgagtggctctggttctgttgttggagacctgagccctggctggagtgggggtggggtaccaggctgggccccctcccccgcccagtggcggaatcttgcaaagaccaaacaggtgaagtgttgacagaggggggtctaatcgtgggccttgggcatacaggaatggggataaggcaggagtgaggaaaggtgggcttcttgagcttgggagatgtgatgtgtgtgtgtctgtgttcagaaaactcctgtcccagtctgtggctactgtggggtgaggttgtaaaaggccctgaatgccaggctaaggagtttggattctgttctgagggcactggggagccacagaagggctttgagcaggggagggcagggtcagatatgagtgtcagaaagttactgtatgaaaagggataggttggagcgggtaagagtggaagccccaagccagggaaagagtccaggacagggcacagatgggagaggttggggaggagagggcgaggccaatggatgagacactcaaaaggccaggagaagcagccgtgagaccgacggtttgagggaaaggcgggagctgtctaagaacgggcctagggctctgggatgaaggggcagtccccgagaaatggacatggataagaagcagcttgggggagatgttgaggccaaattagaaaatgtatttatttttggctgggtgcggtgggtcacgcctgtaatcccagcactttgggaggccaaggaaggcagatcataaggtcaggagatcgagaccatcctggctaacacggtgaaactctgtctctactaaaaatactaaaaattagccaggcatagtggagggcgcctgtagtcccagctactcgggaggctaaggcagaagaatagcttgaacccgggaggtggaggttgcagtgagccgagattgcaccactgcactccagcctgggtgacagagcgagactccatctcaaaaaaaaaaaaaaagtgttcatttttatttatctttttaattttttgtagaaatggggtctcactatgttgtccaggctggtctcaagtgatcctcctggcctcaagtgatcctcctgcctcaaccttccaaagtgctgggattgtagacatgagccaccactccagccagattagaatatttaacagcgggccgggctcggtggctcatgcctgtaatcccagcactttgggaggctgaggcaggtggatcacctgaggtcgggagttcgagaccagcctgaccaacatggagaaaccccgtctctactaaaaatacaaaattagccgggtgtgttagcacatgcctgtagtcccagctactcaagaggctgaggtcggcaggctgaggtatgagaactgcttgaacgcgggaggtggggttgcagtgagccaagattgcgccattgcactccagcctgggcaacaagagtgaaactccgtctcaaaaaaaaaaaaaaaagtaaaagaaaatgtaacatcaaaacatttaaacaaggatgaagttctttagaagtcttatctgatccttacaacatacaaagtagggattttatggaagagaaaatcaaggcacaaagaagtttttaaagtgcctggccaggagtggtggcttacgcctgtaatcccagcactttgagaggccaaggtgggcggatcacctgaggtcaggagtttgagaccagccttgccaacatgacaaaacctcaactccactaaaaatacaaaaattagctgggcatggtggtatacacctgtagttccagctacttgggaggctgagatcgggaggctgaggtatgagaatcgcttgaacctggaaggcggaggttgctgtgagccaagattgcaccactgcactccagcatgggcaacagagtgagactctgtctcaaaaaataaaaataaataaataaatgataaaataaaatgcctaaggtcactcaagtgactgccagagacagcctctgaccctaagcagcctggctccagcgccaaactctgaaccaccacccacacaacctcctaaaaaccaggagacctctggagaaggggtgcagaagctgctgggtccccaaggggatgcaggagagagtttgggagttgtcagcacagagaggaggcgtggaagccatgggggagggtgatgcaccctagggagggtgtgggggtggacaagggcccgggaggaacctccggtgcccaaggagcacggggagagagaggtgtggggaagaggagcaagtgtcaggaagatcgaaggggccttgaagagtcaggacaagagagacaaaggaaaccctcaggcgtggccacggggaggtcactgctgacacagacaaggtaggaggaaaaccccaaatgctggggtcttggaaatgggggtgcactgtgagtgtagataactcctgccatgtttggtgggggcaaagaaaaagtgtgtggtgagacagtgacctgaggagggctggctggaagggacaaggtactcaagtgagtgggggattctgccaggcccctcatccactgagacaggatagggagatgtgaggagagtggggggctgtcggggcgagacttgggactggatattgagtctccttagtccagtgtgggacatcacagagagacatggaggaggctggaggccctgctgggagcctcaggacttagatcctgaattgggatggcagggatggatggcccatggcccctgggagctgagaccagcactgacaggtgctgaggaccctgggacctagttccaagaggcggctgtgtttctggggtagaggctttgaggggaccaggagcagccttcctgggtggggccagagtggacagggcagtcaaaccagccagacaggaaagagaaggccaggatgtgcagaagtgccctcaccggcagagggcaggtggggagcaaccagcctggtaggagtgggtcccccaggacaggcaggcttcctggcagaggggtcccgaagctgtgctctgccagggaacatcccagagtcctctttaacaacccctgggaattctcaagggctagggacgtctcccttcccaccacggcctgtcccaaggccatcctgagtctttgtttttgtttttgttgaaacagtctggctctgttgcctaggctggagtgcaggggcaccatcaaggctcactgcagcctcgacctcccgggctcaagtgatcctcccacctcagccccccgagtagctgggattacaggcacgggccaccatgcctggatattttttgtattttttgtagggatgaggtttccctatgtttcccaggctggtcttaaactcctgggctcaagcagtcctcctgctttggcctcccaagtgctgggcttacaggcatgagccactgcgcccaacccgccctgactcttctcagaccaggtatgaccggtttctcccctcacaccagaggttcccctcaggccaggctcaggcgacccctagaacctcctctttggagactgccttctctgcatctcccctatacccactcctgcccctccctgccccctatgcacacagaggagacaaatacatggctacttccagattattttattcacatggcttggtggggtacaggcactcctgccagagagacaggagcaggcctccctgccagccctggtcagtcacccacctcccggccctcttagggttagtgctagttatcacacacacaacagcgagggggtagagaaaggaaggcaagaagggatccccatctgactaggggcttcagacagccgcagcctgagccccctccatcctggccgggcctggagcccctgtctctgaaaaccccacgctgggcagccgcacccgcaatccaccctcttcctggtccccactcccactccgggccttggggcttagggacaccctggggaagcggaacttgggtgacttctctctgacgggggacttgggggctgcatcgccctcctgcccccgagaggctttagaaggggccgccaggcctacacgtggcaagcggacccggacccggccccggcgacccgaggccccttccccactgccctcttcctcctcctcctcctcctcctcggggctgggggacccttccccagtgaccatctcactttggctgaagcccactcggggcagcctgagtttggggctcttggccttctcaccctcctcggccccctccttggcccgcaccaggccaaaccggggcagccgtaccttgagcttgtgtccggcctctccctccccctctgccacctggtactcggcatggttgcccccggatggcgagagctccacgtcgggcagtgagaggcagaaggtacgctcggcccctgggggctgctcctcagcaccctcgccccccaccctagctctggcccccagtgtgggcaacttcagcctcagcccaccctcgcctgtggccgcctcgcccgcctgtgcctctcggcttagccccacgtccagctcaagctggggcactgtcacggtgggcatcttaaagacaccctcacccaccagcagctcaccacctgcaacctgggctccaggcagagacagggtcacctggggcacctgaaccctgtagcctgctgtgccctctgctgaagggactgtactctgagcctgctgccctggggtacctgcctccccaaagccggtcagctccacctgtggcagggagatgcccagcggaggcatcctcagccccgcgtcatggccctcagtgaccacctgcccggctgtggacaccttcaggcctgacagctgcattccactgacggccacagccccctctgccctcccttcctcctgggcgcccagcgtgaccagctccacctcggggatcttaagctgcacagcggtggactcagccttttcccccgggctggcacgatcaccttgaacttctgcttccttccctcgagccagcccaaaggaaggcatcttcagcttgggcatcttcaccctcccatcccagccccagcccttgccctccaactcagccacccctggcactagttctgctgcctcagtgtcccggcctctgaccccaaacttggggagagcaaacctgggccccttgaacttgaggtcggcccctgccacctctaccttgcctgagggcaggtgggcatccaggctgagctgtgggatggacagatcgagggcaggcagcaggcctgcctccccagcccctttggcctcagcctcagcccccacccgagccttggggagtgagatggcaaatttggataccttcagcttggtagctcgcccagccccctcagcctctgccttagccacctttggccccgagagtccaaacttaggtaaggagaacttggaagagggcttgacttttgtctctatcatctccagccgcccttcctcaatttccacggcgggcagctgtggggtgacaatttcaacagagggcactcggaagcccacttccctgacccctgctgccacctcagggccctccacccgctctcccttgcccattttagcggctgggacctgcccctgcaggccaagtgctcctggcaggtctagctccactgaaggcagagtgagagaggggacacccacatgagcctcaccatccacctctggctgcagacagggaagtgttaccagcttccctgagacctcagcacccgcctcgcctggcttgccacgtgatggggactctgccctccctagcttgggcatggtcatcttgggcatcttgaagccaaattccatcccttctgcctgttctgccttggtggcctttagctgcacctccggagccctgggcagcttcacctctggtgccttcggaagatgcacgtcgggaaccttcggcacttgcatttccggcagccgaatctctgacactttcggcagctgcacctcggggaggtgcacatcgggcacagccatctcaggcaccttggggagttttatctctgggagcttcatgtcagggactttcatttcacagactttgggcagctgcacctctgggaggtgcacatcgggcacggccatttcaggcaccttggggagtttcatctctgagacttttggcagctgcacctcggggagtcgaacctctggcacagccatctcaggcattttagggagtttcatctctgggactttcgggagctgcacttccgggaggtgcacatcgggcacagccatctcgggcaccttcgggagtttcacctcagggagtttcatctcagggagcttcatctctgggacttttggaagctgcacttctgggaggtgcacatcgggcacggccatctcgggcaccttcgggagttgcacttcagggagtttcatctcaggaagtttcatctcaggcacctttggaagcttcatctcagggactttcatctctggcactttcggcagctgcacctctggaagccgcacctctggcacagccacctctgacacctctgggagtttcatctctgacactttcggcagctgtacctctggaagccgcacctccggcacagccatctctggcacctttgggagtttcatctccgacactttcagcagctgtacctctggaagccgcacctccggcacagccatctctggcacctttgggagtttcatctctgacactttgggcagctctacctctggaagccgcacctccggcacagccatctctggcacctttgggagtttcatctctgacaccttggggagctccacctctgggagtcgaacctctggaagggctgcctcgggcacttttggaagcttgacctcaggagccttggggagcttcacttcaggtcccttgggcaccttgacctcgggccctgacactccgatgccaagggagggcatcttgatggtgggcagcttcagcttgctctctacaacttcaggagcagcgggccggggctccaagagggaaagcccaaaggtgggcattcgaagtctgggacctttcaccctggcctcagggctgaccttggctaccttggcctcagcaacttcctttgctcgagccccaaatcggggaaaactaaggcggggcatcttcagggccacctcaggtgcctctccccgggcctccacctctgcacccggcaaggccaggtccacccccacagtcggtgctgccacatccagggtgggcaccactaccgacacagccccttcccgggtctctaggcagggaagtgtgggcagagtgggcagtgagggcaaggcaggcagctccacctgggggacctggattcccacggctggggcctccacagcaggcggagccggggctccgagcccaagggttggcaggtggagggcaaagccaccagctgcctctgctgagggggcagccttgggggctgagacctgggggacacccacctccgcccctggcagccgcggcccaaccagctccacctgaggggctgtgaaacgagctcctgcagccacctcagcctccaccttggctttcctggggggaggagcggcggcggccagccgggctgcctgagcctcttcggccacttctcgtacacgcagccgaggcagctggaggcgccggcgggcaggggcagccgggacaggacccttgacagcctcggctttgaggccccgacgcaggcgggagaacttgggaaaggagaactcgacgtcaacaggggccaggtcagcggggacccccagagccccaggcaccatcttcttcttcttcacaggggacagactctggatgttctggggagagaggagagaggcaggaggcggtgggacagtgggaggctgggagtggacaggaagagccccacctggtattggaccaggcgggggatgtgctgggtcaagtatcttgttccccaaacatcatccccacttcttgcctgtcatttcaccatgagtgcccaggaaagcaggcagccatctaggatctccaaatgagtcaacaggagtgtagggacggggacccaagacttctagatcctgatccgggattttccccaacatcctcattctagagatggggaaactgaggcccagggagagaaacaactttgtccagggccactcagcagtaattgggccagcactcaggctggaatctggctttcctggttcgaagtagcctggttcaggacccctagcaagcctggatccgatggtggggacgcctctccgaggtgggtgagggccctgggctggggtgggtctgtcccccttcccggggaagagtttggggcagagaggaaggggcagagggtggaattagcttgggttagtgacaagacagagggcaaggctggcccacgatggcggggaatggggctcacggcgcagagaccggatcgctggggcagtccagggccggggccgggctaagcacgcgtaccagcttggccaccttggcccgcgggcccttgatctcgtagccagacacggtcccgggccgcagagccaggtccccggtgggcacagtgcgcttcaggcagaaggagactttgtaaggctcggcgcattgcagcaggcgtagtgcgtcctcgtacttgaagttctcgaagaacactcgggcactcagcagctggtcccctgcgggcgaggtggaggtgcgcagcacgtgggcatctcccggctccgcccgggcctagttctgcccacttgcacggagccctcgcggtgaggacccgccccaaattttagtttctccaatccccagcgcaggattaagtcgcagttacgctagtccccgccccatgaccttatccccgccccctgcaatgaacaaagccgcgcccactcaggccacgcccgcaccttgtcgctcccctacccatccttacgtttcagatactgactttgcttcttttaccgagagaacagaatcagaagggaacttccagaatctcccacactgtgtgttcaccccctttctcctgcggcgacttactccattcgccttcctgttcctggggatgaactaaccccactcctagctcagggcaatctctccaccgccttctcagggacatcctccagcaattctctcctcttcccacgtcatcagttgtccttctcgtctacattattcccatcagcatacaaacatattattatttctcgcataagaaaggttgtcatggcctcactcccccggagctcctgccccatttatctgttcaccttaataggcaaaaggtattgagttctccagtggcattgttaccagttctccagtcacacctctgaccctgctttccaacacgcacatctgaactgctcctctcaaggttccaggcagtgacctctgtatagtaagtccaagggtcaagtcccaggcctcatctgcttaaaccactcagcatctgatctaacctcactctctgtcatatccttgcttcccttggcttccaaggtgctacaccctctggagcgtctctgggagttccttgtcagtctccatagatgtttgctttccctctccctgatttctttctttcttttctaaacagtctcactatgttgcccagtccaatctcaaattcctaggctcaactgatcctcccaccccagcctcccaaaatgctgatattacaggcgtgagccactacacccagctttctttcctttctttctttctttctttctttctttctttctttctttctttctttctttctttttctttctttctttctttcacccagctttctttcctttctttctctttctttctttctgtctgtctgtctttcttttcttttcttttcttttttagatggagttttgctcttgttgcccaggctggagtgcaatggcgcgatcttggctcactgcaacctctgcctcccgggttcaagcgaccctcctgcctcagcctcctgagtagctgggaccacaggcatgcaccaccacacccagctaattttgtatttttagtagagacggggtttctccatgttggtcaggctggtctcgaactcccgacgtcaggtgatctgcccgccttggcctcctaaagtgctggcattacaggcgtgagccaccgtgcccagcccctcctcttttttttttaagacaagatctcgccaggtgcggtggctcatgcctgtaatcccagcactttgggaggccgaggcaggtggatcacctgaggtcgggagttcgagaccagcctgaccaatatggagaaaccctgtctctactaaaaatacaaaattggccaggcatgttggcacatgtctgtaatcccagctactagggaggccgaggcaggagaatcacttgaacccgggaggcggaggttgcggtgagctgagatcgtgccattgcactccagcctgggcaacaagagcgaaattccatctcaaaaaaaaaaaaaaaaaaaaaaaaaagacaagatctcactcttcacccaggctgtggtacactggtgcaatgacaaatcactgcagccttgaacttccaggctccagcgatcctcctgcaaatgcaggcccgtgccaccacacccagcctctctggcctcttaaagacacactaccccagacctcaggacttggacctcctctctgtctacatgctcaagtcaccccttgggaattcttgggaagttcatccagattgagaagttaaaagaccataaatctgctaacaattcccaagtatatctctccagtccagcactctcccctccaccctagactcacatccaacatctccatcatatctccacctgggtgtcccacaccacacctctcctttaacagatccaaactgtactcctggtctttcttagtactagcctcagtgtgctccttttgagggaccagcaactccatcctcaggtcaaaaatccccagatccatcctggacaaccctctttccatcatacccaatatccagtcctcaaagctcctccttcaaaatatattcagaatccaaatatatatatacctccaaaaccctttggtcctgagcatcctcatctcttacctggataatcacagtagccagtttgttgatctccctgctcctaaacctgccttcatatattctactgtttgttgttgttggccttgtttttgaaacagaatcttgctctgttgcccaagctggagtgcagtggtgtgatcatggctcattgcagcttcagtctcctgggctcaagcgatcctcccgccttggcttccccgagtgctgggattacaggtgtgagccacccaatgcttggccatactctactgttaatgcagcagttcagcacagtcaattcacgtttctccctgctcacagccctcacagaataaaagccaaagtcttataaagccctctaaaaagtgtcctccccttacctctctggccttctctcttactctcctcttcactaactcaattgcgtagacactggcttcctcactgtttctaccacaagctaggcatggtcccaccttggggcatttttgctgtctgttccctcttccagatggcctcatagcttgttcccttacctcctttagccttttcaccctttccagcccacccctttttttttttttttttaggcggagttttgctctttcgcccaggctggagtgaagtggcgcgaactcggcttactgcaaccttaagcaattctcctgcctcagtctcctgagtagctgggattataggcgcctaccaccacacccggctaatttttgaatttttagtagagacagagtttcgccatattggccaggctggcctcgaactcctgacctcaggtgatcagcccacctcagcctcccaaagtgctaggattatgcacccagccaagcccacccccatttaaaaatgcagctgtaggccggcctcggtggctcacgcctgtaatcccagcactttgggaggccgaggagggcggatcacgaggtcagaagatggagaccatcctggctaacacggtgaaaccccgtctctactaaaaatacaaaaaaaattagccgggcatggtggcgggtgcctgtagtcccagttactagggaggctgaggcaggagaatggcgtgaacacgggaggcggagcttgcagtgagccgagatcgtgccactgcactccagcctgggagacagagcaagactccgtctcaaaataaataaataaataaaataaaataaaataataaaaatgcagctgtagcacattgtcctcctggcaactgtagcacttactgctttctaatttactaggtattttacttaatttgcttaaatatgtctctcccggctgggcgcggtggctcacacctgtaatcccagcactttgggaggccgaggcgggcagatcacgaggtcaggagatcgagaccatcctggctaacacggtgaaacctcgtctctactaaaaatacaaaaaattagccgggcgtggttgtgggcgcctgtagtccctcccagctactagggaggctgaggcaggagaatggtgtgaacccgggaggcggagcttgcagtgagccgagattgcgccactgcactccagcctgggcaacagagcgagactccgtctcaaaaaaaaaaaaaaatctctccccactggaatgtaagctccataagtgcagggactgttgttcagttttgttcacggctgaagcccaagcagctaagataatgtctgacatagggtggggcacggtggctcacgcctgtaatcccagcactttgggagactgaggcggatggatcacctgaggtcgggagttcgataccagcctggccaacatagtgaaaccccgtctctactaaaaatacaaaaattagccgggcgtggtggaggggacctgtaatcccagctactcaggaggctgaggcaggagaatcgcttgaaccagggaggcggaggtggcagtgagccgagatcgtgccattgcactccagcctgggcaacaagagagaaactccgtatcaaaatacataaataaataaagtctgaaatagaaggcactaataaatagttgttgcatgaataaatcacgtcagcttcatccatatcctaaaacatcctttactcttcccaacccctctaagtggctcactccacccttttctcctgccccaacaacaaaaacatttactagcactcacatagttaagcactatgtgccacttagctatgtgctaagtgttttcacatactgactcgttaaatcctcaatacataataaccccatactagaataagtcccatttcagagatgagaaaactgaggcacagaaagatcacaagctagtaaacgggggatgtgaaattcgcacccagacagtgaacctccggaatttgctgtgaacagtcagcaaagccccgccccaagcccttaacccctcctggtcgccggtcacgcccccatcccccggtcagtttcagcctctctttggacccaaggcagattcctaaccccgcccccgcagttcgaccccgccccacaccccgggcccgcccaccttcctgcaggctgaggctcctggcggcgggtgagtcctcgcgcagctcccgaacgaagattccctctttgccgccgcccgctacgttgatgccgctgaccccggtctgcgcctccgtctccacgataatttccaccaactccgcccgcctcagctcctgcagagggcggcgaggtgtcgcgttggggctctagggccggacctcgcccagagcccgccattgcgctcaacagtggctcatatacatatatatgtttatatatatttagagacgggggtgggggacggtctcgccacactgcccaggctggtctcgaactcctcctgggcccaagggatcctcccgcctcggcctcccaaagtgctgggattacaggcgtgagccaccgcgcccggccaaaagcggctgttcagcgggccttcagggcacacgcccctcggcgctgccctcgcaggacgtcggggcacacccactccggcgtctcccctttaagcaagcctgagggcagctggctttctaggacccgcggaacggttaaacagctccgcgggccggctggcctctccgaggccctggagcggcagccgaaaggggttaggggaggagacggggttgtaaggggagggactgcgtcggagtgggctggagataacttgagttgtgattgagaggcgggaccaggatcgtgggggcgtggtcaggtcgggagggcggggctggggggggttggtgcgggtaggaggggtaagacaacacaggcctgagaggaagagccaaatggggtatagaagggtgcaaaagataggagaggaatgtggccagagtttatgggaggttatttggagctggggcggagacccttattatttttttgttgggggagacagggtctctcactctgtccccaggcttgagtgcagtggtgtgatcatggctcactgcagcctccacctccttaaactcaagcagaccttccgctccggtctcccaagtagttgggaacataggcacgcgccaccacgcccagctaatttttaattttttttttaagagacaggggtatcactgtgttgcccaggctggtctcaaactcctggcctcaagagatcctcctgtctcagcctcccaaagcactgggattacaggcatgagccactgcatctggcccggagacccatattctacaaactgaatttaactatgggggaggggctttaattacagcagaacaagagaatagttgaggatgggattctgaggaaggggctggctggaccttcaagccctctgggattggggggacagggagtgggatttgcctccctgcaggcttgaatgtgtgtgagaatgtgctctattgtaaattcaatgacccgaagacctgtgaaacgcccacaggagagggaatccagtgaagggggtctgcgtgggtaatgaatgggactgggagacatggcattcccggtatttactgtaaatgatgcagattggacctggcccagaagccactatgggattcacaatagggcttcccagaagaggcagtgacaaacctggatcctgtctaggaatccaatctgctgtgtgtcttaggaagaatcttgccctctctggacccacttccctgctgcaaaatagggtaacataggcatactggaaggaggttgcagtagggatctgagaggacactgtcatggccaacgcactggggccagcacggactggaattgagcccaggacttggagggagagcaggtctaggccagatgccccacagcagtggccccaagggactagggggctgagcagggcagtctgggtaaggagagttgtggctgggactgtagggaacagcatgaccaccagtaccgccctttggctcagcaggccctgggctcagcattttatgtgcagaatctcttttttttttttttttttttttttttttttgaggcggagtctcgctctgtcacccaggctgggagtgcagtggcacaatcttggctcactgcaacctccacctcccgggtcaagcgattctcctgcctcagcctcccgagtagctgggattacaggtgcacgccaccacgcccagctaatttttgtattcttagtagagatagagtttcaccatgttggccaggatggtctcgatctcttgacttcatgatccacccgcctcagcttcccagagtgctgagatgacaggcatgagccaccgcgcccggcctcttttttttttttaagagtcggagtcaggccaggcgcggtagctcacacctataatcccagcactttgggaggccaaggcgggaggatcacctgaggtcaggagttcaagaccagcctggccaacatggcgaaactccatctctactaaaagtcctaaaattagccaggcgtggtggtgggcgcctgtaatcccagctactcgggagactgaggcaggagaattgcttgaacctgggaggcggaggttgcagtgagctgagatcgcaccactgcactccagcctgggtgacaagaccaagaatccgtctcaaaaaaaaaaaaaaaaagagtcggagtcttgttttgcccaggctggtctccagctcctgggctcaagggatcctctggcctcagcctcccagagtgttgggattacaggtgtgagccatcgaatgcagtctgcaggatctcatttcatcctctccctatagccttgggcagtcacagaggaggacactaaggcccagagaggtaaagtgacttgcctaatgccctgtagcaagttaagcggctgggcctcaaccttaggtctgtgaccccagaactcataggccatcctgtgggcagagaactcctggcgctgtacccactgcctctcgcccccagtagcagcttggcccctgtaacagtagacccgctctgtgcctggtatacagtaagacatggtcaatgccaatccaccatctcagtaacagtgacagcagctgtcattcaaagaggcttcctcagcaccagactctgtgcaaatggctcaagcgggagttctcagaggtggagatcattacctccatttcttttttttttttttttttttgagacagagtctcactgtgaccctcaggctggcatgcaatggtgtgatctcggctcactgccacctccgcttcctgggttcaagcaattcttctgcctcagcctcccgagtagctgggactacaggtgtgcaccatcatgcccggctaatttttgtatttttagcagagatggggtttcaccgtattggccaggctggtcccgaactcctaacctcaagtgatccgcccgccttggcctcccgaagtgctgggattataggtgtgagccactgcgcccagccccattacctccatttcagtgggaaactgaggctgaaagaggtgagatcatctgcccagggccacacagctgaagtggtagggttgggatttgagccatgggtccaagcccatgtccttaactcctacattatatgcccttgtgtgtgtgtgtgtgtgtgtgtgtgtgtgtgtgtgtgtgtttagacagggtctttttttttttttctttgtttttctcatttattctttccacacaggagacttaatgagacaggatcttgctctttcacccaggctggcgtgcagtggttcaatcatatctcactgcaacctcaacctcctgggttcaggtgatcctcccacctcagcctcctgagtagctgggactacaggaatgcaccaccaaacccggctcatttttttttccggtagagacagggtcttcctatgttgcccaggcttgtctcaaactcctaggctttagcgatcctcctgcctcggcctcccaaagtgctggaattccaggcctgcgccactgcacctggcatatgctgcctcttctgatgaagggtttctgccggattttcttcagctccttattaatttagctcctttgtgcgccagtgatttcactgccttgagtcttagcctgtgccagatgctgcactaaggacattacatatgttaattttcttctcctcacagtgacccataaaatagaccctgttattatttccatttcacagatggagagaatgaggcacagagaggccagaaagtgtctccttgctgccctagtctgtgcctccccattgccctcaagtgcgccttgcaggacacgtgggcactcacctcggcactccggctcctggcctccatggcgttgctgggaggcacctgcaccccaggctcctgtgtcctctcccctttctgctgcagaaccagcttcagttctgcatggagcagctgcctctgagcctgtgggaggacagcagtggaggcttgaggccagtaggggacgagaggtggaggccatgcttacagggagaaagcagggtgggtattagaaggggagaagggcccccaccccagctgtcctctcaccgctgcctgggtgcaggcacttcctcctaacaggagcccagcccgaggtgccgcacagctgtctgcagggctcacgcccttccgtggggttcttgctgcctgccagggaaaggccaggatgtgaagctccaggcaggcgaggaaggggtggggaggggcatatggcaccagcctgcgctcacctgagggtcacctccagctccttgggcctcctgggtccggcgctctaagaagaataatgtgagcagtgttattggctaacagccaccgatgacttcctgagtgcctgaccctgctgcgttctgctgataccctatccccgtcgtgcaggtgggaaactgagcctcagaagacctttacccaggatgactcagctggacaacacacggtaaagccaaaactgactccgaggcctgtctggcagcagagcccccgtgccaaagatcttggccaactgagggggccaaattcactaaaaaataattgctatttgagacagggtctagctctattgcccaggctggagtgcagtggtgcaatcacggcacactgctgcctcggtctctgggctcaggcgatcctcccaccttggcctcccgagtagctgggaccacaggtgcatgccacaacacccggctacgtttttgttgttgttggtggtgtgtgtgtgtgtgtgtgtgtgtgtgtgtgagagagagagttttgctctgtcacctaggctggagtgcaatggcgcgatcttggctcactgcagcctccaactcctgggttcaagtgattctcccgcctcagcctcccgagtagttgggactacaggcacgcaccttgggactacaggtacgcaccgccatacccggctatttcttgtatttttagtagagacggagtttcaccatgctggccaggctggtcttgaactcctgactgcaagtgatcagcccaccttggcctcccaaagtgctggaattacaggcatgagcctccacacctggcaacaccaggttaattttttaaattaatttgtagagatggagtctccctaggttgcccaaactgagctccaactcctgggctcatgctatcctcctgcctcagcctcttgatgctataaaataattatagccactcccatgtactcccagtgagcaaatcacagctcctctctgtgcttcagttatgttgtctataaaatgtggagaataagagcttttacctcgcagggctgttccgaggctcaaatgagttaataagtgtaaagtgccaggcacctggcaggtgctttataaatacttgctattattattattattattattattattattattattttgagacagagtctcgctctgttgtccaagctggagtgaagtggtgcgaattcggcttactacaacctctgcctcctgggttcaagtgattctcctgcctcagcctcccaagtagctgggattacaggtgcccaccaccacgcctggctactttttgtatttttagtagagatggggtttcaccatgttggcaggctggtctggaactcctgacctcaggtgatccacctgcctcagcctcccaaagtgctgggattacaggcatgagccactgcacctgtcaggccattattattactaagaacttcctatggccctgaccttgtgtcgagcgccccacatgctccactgcacatggccctcagcacagccttgtgcaatcagctactactgagcccattacagaggagacacctgaggctgggggaagggatgtcactagcccaggtcacaaatggtcgagccaggacttgaatttgtctgaaggctccagccctttatctgggtagtaataatacctgatgggtactgagtgattagtatttgctggcccccgtgctaagaccttcaccttctacttcacctcggaaaaccccatttcctgagaggccaaaagaacttgctcaaggcctcatagcacagccagaaggaggcaaagctgaaattcacatgcagccacccgccaggcccatctggggaaatggagatgaatactctctcccccaacccccgactctgggcttgtcctcacagcccccacctggcatgccaacccgccaacccctattgcacagggaaaggtcaggcctcacgcggcacattccctcacacaatggcccgtctgctgtgctcagttgcattccgcccctgcccacccaccctggccacacaatggcctttcatagcccatcagtggccaggagagaggacatggggaccccttaacactcccacagcacccacgccccccacagtgtaagagggcttctctctgcatctcctagggggtcctggtctctgtggccttccctgggatcccctgtgagccccctacaccttccaggctgtgccaggacttgaacttgtctaaaaactccagcacgggctgggcgcgtggcttaggcctgtaatcccaacactttaggaggccgaggtgggtggatcacgaggtcaggggttcgagaccagtctggccaatatggtgaaaccccgtttctactaaaaatactaaaattagccaggcgtggcagcgcgcgcctgtaatcccagctactcgggaggctgaggcaggagaatcgcttcagcctgggaagcggaggttgtggtgagctgagaatgcaccactgcactccagcctgtgcgatagagcgagactccatctcaaaaaaataaaaataaaaataaaaaaagctccagcgctttagctggacaatcataataacaactgatgggtattgagtggttagtattaatattagctggtccctgcactaagaccttgtctgccatgtctggggcatttcctctgaattgggccctgtgctagcacccacaggcctcaaaatcaccctagatgttgtggctgttatggggtggaaactgaggctcacagaggggtcacccagccagaaaggggcagagctaggacccgtgcctgcccttcacccctgcttcaccttaatttgcattggtggctctgcgcactggggcaggagctgggttgggcaggagggggccaacggtgctagaaacacacccaggccaggtgccgggcctggaccgggcaggcgctttacatacttgaccttgtgggaccccatttaactgatgagtcaatgagagttaagagaccggtgatcacagtgacagagtcgagacttgagcccaggtgtgaaagcgaactcagttcccttacccaggactgatacacagcacagagtcctgagctggggacacgagaagcctgaaccttgtaggtggtagtagagggggtctcctgggtcatcagctctctgtcccaggcccgtggctgtgagggtcatgcccggagcctggcacaggaagttcaggcggggcagggacaagagagagtgccctccttcttcgtccctgcctggacaggcacccagcccaggttatatttagcccaactgtgctcttcctgagccacgtacccagcccctggggtaaggtgggggcagcttcggaaggaaacccacagagaggactctgtgttcccagctctgcctatcccactaggcaggggaaagaggggtggggaggctcctggggagggtccctgccttgtgttagaggcagatccactgggaccaggcagacactccagatgccagcagcctatttcttgggtagttactgtggcatgaccctggcatatgccagaactttcagaatccccagggtccccatttcttgagcacctactgtgtgctaagatccttcctgtcttggctccttaaatctttgtaacatctccctggagtgggtacaactgagatatccatttcagatgcgacttatgcccttcagagcagctgggagcgaggggttgtcattcggaggctgctgagggatcggctgagggcattgcccttctggccctctttccctggtgactgccaccaacttcacttgggaaccctgcctgctcagagcctcagctttcccccgccaccagcgtgatctctcatagcaatgggggtcaggggttgggctgactcatccagacctctaaacattatctgaggccacctagggggtcagggggagttaaggcagtggcctctggctgcctcggttagtccctgctccagcacttcccaggtgtgaggacttgggcaagatccttcatctctggggcctcagtttctccatctgtaaaatggagccaataagaaaggctttgaagatttgtgagagaacagcaggtgcttagaatatccctcctgtatagtaaatgcttgattaatataaactcgtctctgacagcaacagggagagtatggagggagggagctgtgcttctcacagtgttgcacatccaacctttgctcctcagtggcccccactttctctgctaccaaaggggagctttggctgagagacaaaacccagctcaggcaccagcctcccaacaggatccatgctgcctccctagcaccctactccagggacccaccccaggcctcctgccccagctctggtgtttgttagtttgttttttggagacagggtctccctctgtcactgagactggagtgcagaggtgtgatcacggctcactgcagccccaacctcctgggcccaacccaatctcccatctcagcctccagagtagctggaaccacaggcatgcaccaccatgcccagctaattaaaaaaaatttttttttgttttgtagagatgggggcctctctatgtggcccaggctggtctcgaactcctgggcttaagcagtcctgccgcctcagcctcccaaagtgctgggattataggcatgagccaccatgcctggctgccctagctctttaaaagcagcaactcatttactcggcaccagccctgtgaggtggcctccagacatcagcccattttagagatggggaaacagaggcacaaaggatgaagtatcttgcccaaggctgcacagccagaaaggagaggaaaggggatttgaaccaccagctccaaagtctatacctttaacacctacaccacacggcttcctgagcccccaggccccctcccagcacctcccgggaccctgaacctcattcccacagtgtctcagcctggccagggaagggaccggccggctgatctcttaccgctgagcctccagacacctcgagagctcctggtcccgtctgtcagccctagccctaggctgggggggaaaaggaatggggaggggggaggagagagagaccccagccattggctgcgggggtgtgacgtcaccagagggtgggtggtggagaaacaaacatccccctcctccagctacatctatccccaaggggtgggggccacgggacagccaccagccgcctctctcttgcctgggccgagatctctgccatgagctcagcttcaaggatttgcacgttggcttcctcgacttggagaatcaggaccccaccccagccccactgtttcctggctccaggacccgggcctggccaactgcctctactgtaaactcctttcactccctctccctgtcaacttgggttcaaatcgcagcgcgaccacttcctcgctgggtgacctgctgccagtcacagcttctctttgcggatagtaagagtacccaccttatggggctgtggtgaagattaaacgagttaaaagagactgaaaatgtaagacaatgccgggcacataatgagggttactaataagtatttggtattatttttcacacaaattaggtggctggctcatcttgctggggggttttggccccttttcagtaaggctgggcacaggggacccccagttctctgtctaatggagttactgtttagggggacacctatcacatactaagtaccatgctcagtgctgaagccctgcttttgaatcaagggtgtaaaatgggctccttatgctccccacccttttttttgagacaaggtctcactctgttgcccaggctggagtgcagtggtgtgatcatggctcactgcagcctccacctcctgggctcaagcaatcctcccgactgagccccctcaaatagctgggaccacaggtatgcatcatcatgcccagctaatttttgtattttttgtaatggcaaagtttcaccatgttgcccaggctggtctcgaactcctgggctcaagcgatcttcccacttcggcctcccaaagttctgggattacaggcgtgagccaccgcgtccagctatgcccaatttatagctatgtggccaggaggtggtgaagctgaggtccaacccctgttctcctggaccacaaaaaccctgctacactcttctgccccttccactttgcagaccagaaggctcagagaaggtaagtgactctcccaatatcaccatagcaggtcattggcaggggtccagagttgaacccagacctgcccgactcccaagccaaagctaccaggcctcacccccaacccctggaccctggtccagcccccagcctgccctgactcaccagaccccggggggcggcacagggagcacaggtacccccacatgccacttgaacccacccggctgctgcctcggaagctcgtcgctctctgaacccaggccccaggcctgggctgggctgaggctgggggattacccccaaagcgcatgtcagcagcttctgccccattgtccagccaggcacagacaccaagccctggcctctgtcggcaccctcgcccctcacaccagcctgggtggcccctctgcagacctgtcccccatctcacaccagagggttggggcctacttcagagggcgtgggggaccaggccaggatggcaggatcccggaatgctgggggcctccctcccttctctctgaaatgccccctgcccactctcagccaccggggaaggcaggaatgtgctgagctctgggaaatgccttccaggcctggcagcaaccaagcattggggtgtggccagaagccagccagagccctcctcccaggaggggtagaagggatggtatggtcggggctcccgatgggcctgaggagaccctcacttcattgcagtctctctccttcattgattcacgcaaacattcttttgttcctatattcattcaacaaacactcacaagccctgtttagtggtaggtcttttgctgggcacaggggacatcaacagatctaactccaccccagggaggaggcggcaaactcaggaaaggatcctgcaggaggtgatatcggcagtcaaactgaattagccaggcgtggtggcgggcacctgtgatcccagctactcgggaggctgagcaggagaattgcttaaacccaggaggcagaggttacagtgaggcaagattgcgccattgcactccagcctgggtgacagagcgagactctgtctcaaaaagaaaataataataaataataaaaggaagtcaaaatggaagattgaggaggagggagctaaggaaaaaaggagggaagggggttccaggcagagggacaaatgtgggcaaaggaccagaggtgagaaatggagcgggtcttcattcaccatcagcaaacattcagtgagcacctggtcttctgtccagtcccaggctggatggtgctggggacacagtgtgactgggacagctcaggcctgcatccacaccattcacagtccagcagggaacaaacccagaaagaggagggttgtgatggggcaatcataggcagagaggtcaaagccttgatggggaagtccagaaaaggtggctgccccagcctaggaagagaaatcaaggagggcttcctggaggaagtggcatttgagcttgcacctggaggatatatagaagttaacccaaagccatgggtggtgaaggaatgacagtgtgtttcaggtagcgggaacaccctgtgcaaaggccctttgagaaaacggttaaggtgagagtgtgagggaaaggtaagaggaggtccaggggtcagcagggccatgaggagggcctcagactttgtcctgtgggccctgaagagctatcagagggacaaagtatgaatagcactgagcttttaggtacctgaaggcagaaagaggctgagctatcagccaggctagcatagggaagaaaatccccctctctctgctcagggtcaaacagaaaagggaggctggtacacaacatcccctctcttcccttgtcgcagagagcagagatctttgcttgttctcagtcttaggggaaagcatttaaccttttgccataaagtaggaagttagcggtccatgttttgtagatacgctttatcaggttaaggaagcttctttccctagtttgctgtgagttttttgttttcttgtttttgagagatgcgggtctcactatgttgcccaggctggcctcaaactcctggcctcaagcgatcctcctgccttggcctcccaaagtgctgacattacaggcatgagccactgtgcctggcctgctgtgagttattttctttcttttttttaatttttcttttgtttttttttttttaggcagagttttcgctctttcacccaggctggagcaaagtggcacaatctcggctcactgcaaccttcgccccctgggttcaagagattctcctgcctcagcctcccgagtagctgggattacaggcgcctaccaccacacccagctaatttttgtattttacacttgatcttagccaaaaggccaagaagcaataattttgtatttttagcagagatgggggtttcgccatgttggccaggctggtcttgaactcctgacctcaggtaatccacccgccttggcctctcaaactgttgcggttacaggcatgagtcaccacacctggactgttgtgaattcttatcacgaatggtgtgtctctctgtgtgtctctatctttgtgtctctctgttcttctgtttctctctgtccttattctttgtctctctttcctagtttctttctgtctcattctgtctgtgcgtttctctctccctctctctctgtcatgctttccctcacccaagggggtgtggccacgggaagctaagttgggggtggccccagtgtcctggttccggctgtggccaccgcagtaaacacaggacatcctgtgaggctagggaaggaggtggacgcttcttctcagggaccaccctctccagactcagtctgagccaagcaggagccttggcctgccctgcgtggcctagccactccgccccacccagtccagccaagggacactggtgtctccctcgatcccaccgttcacgcccacccccacaccccagtcctctctcctgagctcccggcccagggcccgggcagctccatgccttcccctgggtgtctccccagcctcttgcaccccctgggtccctccttggcctcagccccaaccccagacttgcttctctccccagttgccatctcagggatggccccagtgtctcccagtcccctgattagagccctgagcctggtctgagacccctcctccaggccttgtcagtcccacagcctgtctgctgggcctcctgagtgcctcttccctcccaacagctgctccgtccctccccagattctccacccctgggatcctgggctcctggcctccagtgtcacctccccgacgatgccacccacctagtgaagggatccttttacttcatgactccccagcatcttcagagttaagtcccccatccagggtcctatatgccctggcccctgcggacccttccagtcttgtcatttaccttactgctttcctcctccttccagccaaacccagcagcttagagatccctgaaaatgttgtagggtctctctctcagtgacccttgctgtttccttgcccaccagaacaatagttctttggggcagatactgttactgttccagtttacaggtgaggaccccgaggctcagagaagttaagtaccttgcctagagtcacacagccacagagcggtaactcttttttcttttcttttcttttcttttcttttctttcttcctttcttttctttctttcttcctttctttcttttctttcttcctttctttctttcccttccttccttttttcttctctctctttcctttctttcttccttccttcctctctctcccttccttccctccctccttccttccctcctgccttccttccttccgtccttccttctttctttctgacagggtcttgttctgtcacccaggctggagtgcagtggtgcaatcatggctcattgcagcctcaaactcctggcctcaagtgatcttctcacctcaacctcctgagtagctgggactacaggcgtgagccgtcgcatctggccaaagctggggttcaaacccaggcagtctggctttcaggaacagtctcttctctccagcttactgcttcaataatatctctgttagatttctaaagtgtgccgggactgcataccataggtgctcaataagtgttttttaattttgtttggtttggtttttttgagatggagtctcgctctgtcgccaggctggagtgcagcagcacaatctcggctcactgcaacctccgcctcccgggttcaagtgattctcctgcctcagcctcctgagtagctgggattacaggcccgccaccttgcccagataatttttgtatttttagtagaaatggggtttcaccatgttggccaggatggtctcaatctcttgaccttgtgatccacctgcctcggcctcccaaaatgctgggattacaggcgtgaaccaccatgcccggccactcaataagtgtctaatgaatagggacagaggtagaaggtgagccttggaaagtacagaattcagaccccagagaagtggggtaataagggcccaggggcaggggagagatgtggtcagatttaccctttacatagggataggcacacagtaggtgtgtgctcataaatttttgctgaatgaaggacaggaagaagggagggaggaaaaagagacaagatagctggtcacagctcttccaggtgtgagagagagagagagagtgtgtgtgtgtgtgtgtgtgtgtgtgtgtgttttgggggtggtctgtgaatgccatggaggaaagctggcctagggggcgtcatggcgagcatacacagaggctctgtgaaaggtggcagttgtgccagggctggcggctcagctaggaatggtgtgggccctggagtctgctggccaaggtggtgtggcctcctggggttgagcctgagggtggagcagcacaccagagccagggagcctgcacaacccatctgggggtgacacatggggagagaggggcaggtcctcacacatgagccattcataaacctgagggcaccgggcagacgggaccagggctgatgtagcccatatggtgcttttgtgtaaaagacatgccccttcctggaggtacttgacctccatctgctgggaaacttgtaataaatatgtaaatgcagggtacctggaacaccagtggcagccccttacatacggagcctatatgcagtgcacaacctatgcaactgtacctagaggctctggggagaggggccatcagtggcaaagcaggcacaggggcagacggaaggatcagctcaccccatattgggcctcggagacatcagaaacaggtccttagctgggcacagtggtttgtgcctatagtcccagccactctgagggctgaagccagaggatcctttgagcctaggagttcaaggctgtacagcactatgatcactcctctgtacagacagtgctctccagcctggacaacacagtgagacccaatctctttgaaaaagcggggaaaggaaagaataagaaacaggcccacgggaatcccagcactttgggaggctgaggtggaaggattgcttgagcctgggggttcgagaccagcctggacaacatagggcaacactgtctctacaaaaaatttaaaaaatcggccgggcatggtggctcacgcctgtaatcccagcactttgggaggctgaggcagggcggatcacttgatatcaggagttcaagactagcctggcgaacatggtgaaactctgtctctactaaaaatacaaaaaattagccgggcatggtggcaggcgcctgtaatcccagctactcgggaggctgaggcagaattgcttgaacccaggaggcaggggctgcagtgagccgagattgcaccattgcactccagcctgggcgacagagcgagaatccatctcaaaaaataataaataaataaataaataaaaataagaataaaaataaaatcagttgggcgtggtggcgtgcacctgtaaccccagctaattgggaggctgacgcgggaggattgctgaagcccaggaattcgaggctatagtgagctatgatcgcgccactgcactctccagcctgggcgacaaagcgagaccccgtctctaaaaaaaaaaaaaaaagaaaaagaaaagaaagaaacaggcccgcagagtgttgtaaacagagggcgttcatgatccctcgaccactggacagatgtccggggaacccaagacggcggcaccgcagagcccgactgggcaccagggggcggtgctgagctcagcccaggcgcccaagttttgagtctgcggcaaagcagtccgagtcccatttgcccggggctggagtcactcggggttggagtcaggcgcctggaagaccctcagcctggacgacagctccccgcaggccattttcacccgcttccgcggcccgcctcatccacttccagaaatgggcacaacttcctctgctcctccaggaagcgccactctgcccgccccttcccggcccctggggccgacccaggctccccatctggcccagctccactcctgcctctgcctccccgaggcttctggccagaagcgaggctctgggaccccacgatggcggcgtttccctcactcaaggccccgctggcccctcgggtcaccgtccagccccctgcgcctctctccatgcgcacccgcagttttcacggtgacactccctcccctccgtgcaccccccctcaggctccgccctgtccctgcggccgtcaggaaggacgcagcctgggtcccgtgccaggccgctgagtgtgcggcccctcccagccaggcctggaatgcggctggaccgcgggggcggccgctgacacccggcgctccagccaggcccagcacacgggcaggtggccccagctcgtccgggtctgggtttcttctagaaggaaggcacagctgcctgccctgagctccctctctgcagtccagctaccaagcctagtggctttatttcagacacagctccaagcgtccctatcctttgcccagagatttaagaccaggagtgaattttatttttaaaaatgggctgttgtccccctttcctcccccattttcctggagagccgactctcagggctccttggagaggatctgtccagggtccaggttttgtgtttttatttcgggaccattctgaaagcaatctccccttcgctcctcaataaatacaggtagactccaggcgaggacttgctttcatttttaaaaagttgccttgacttcctgctagcaaagaaaagaaataaaatttaagaaaaaaaaaaaaaggccaggcacagtggctcacgcctgtaatcccagcactttgggaggctgaggcaggcagatcacgaggtcagaagatgaagaccatcctggctaacacggtgaaaccctgtctctacaaaaaatataaaaaattagtcggtcccagctaattgggaggccgaggcaggagaatcgtttgaacctgggaggtggaggttgcagtgagccgaagtcacgccactgcactccagcctgggcgacagagtaagaatctgtcttaaaaaaaaaagaaagaaaaaaaaaaagtggcctggtaggaggatcgcttgagcccaggagtttgaggctgtagtgagccatgatcagaccactgtacttcaacctgggtgacagagcgagaccctatctcaaaaaaaaaaaaaaaaaagttcataatttaaaacccacctcaagtgataatcttggaaccttggttttctcacctgtaaaatagggatgataatactaccgatcttgtagggctgttataggattaaatgagttaacacagtgacgtgcttagaaactgtgcctcgtacacagcctacgcccaataaaatgtttgatgtttttatctcgccttcacatttgcccagagacaaagcagcacacggatttgagatttcccaggactggctttaatttgaaaaatctgattggggtctcttcccgtatcagagaaggaacagcccaagctatgaccccagggccagggaattcagtccccaccagaccctgtcattccatcactagggggtaattccaggctccccctgccagccctgagacaggaggacggatgtgaagttgcccaggactagattctgtctctccaaagtggcccaagccctgttctctgtactagggaagccagctgtgtcttttcgaggacagttggtccagccagcaggctcagttcagataccagacaaccattccagcacgagggctcagcgccctggccccggcggtcgctccagtgcctgtgtgcccaccagcacatccatgaggtagtccaattcggcctcgtccagctccggagcttcctccttgcccggcccatcctcagggcctggtttgaggccctcagaggctggtgcccaaagttcattgtcatacatagaggtgtcaatatcctcaaacaggccctcaagcccatcgtccagtagacagccagtggctgggcccagcaggtccaaggcacccaggctgggcgctgctcccccgatgctacggcctggtggcccctcgtctgccaagggttggggagcctgactcaggccctcaatgtggctgaggtcctccaggaggctggccatggaggctgaaagggcagcgtccgagcttgccagtaagttgtcagccacactgggggctgcaggtgggctaggcacaggtggcagggcagccgcgggtgccatggacgcctggatgcgccgcagagtgttcacgaccagcaccaggtgccgcaggtccggctcactctgctgcaggctgtggtggagcttgagcactgagaggtcaaagagggagctagaggccacggccgggggtgcctgtgccaccgctgtgtggccaggatctagccaccaggagtcgactgccagaggttccttctcctcctcctcctcccgtttccgcttcagacccttgctcagcatctgcagagggcagggagttatggagttatagtcagttatagaaaacaaatgttaagttcaaagcctggatctgacagttgctgcaggtaggatcttggggaagtcacttaacctctctgtgcctagcttttcttagggaactttaaagatatagacaatttttatttaactgtatatgtatatttatagattttttttgagatggagtctcgctctgttgcccaggctggagtgtaatgccgtgatctcagctcattgcaacctctgcctcacaggttcaaatgattctcgtgcctcagcctccccaaaagctaggattacaggcacatgccaccacacccggctaatttttatatttttagaagaagcatggtttcaccatgttggccaggctggtctcgacctcctggacctcaagtgatccgcccacctctgcctcacaaagtgctgggattacatgcgtgagccaccgcgcctggcctatagacttcttaaattttaaattttatatttaagtatatttatagacttttttatctgaaaaaataaagatggggtctcactatattgcccaggctggtctcaaactcctggcctgaagcgatcctcccccctcagtcaataagtacttttttttttcccttttatttttttgtagagacatggtctcactatgttgcccagggtggtctcaaactccttgcctcaagccatcctccttcctcagcctcccaaagtactgagattacaagtgtgagctgcctcaccctgccaataagtacacttaatgataacattattatttcttcagtgaaccatgtggaatggccaatattcaactttttcccctacaaaagcagctgtttcacatattttattataataacataattatatctaaataagttataatattataaatactaaactagtttcacgtagtttaatatttattgtctactatgactatgtttcaaacagtaaataaataaggaaacacaggaaatgtacagagaattacaggaagacactaaaagttcctagagaccttttagatcatcagagaaggctcctgtaaggaggtgacatttgaatggagccctcaggccagagaagtcagccatgggagaccctgggaaaagcattccgggaggagggaacaacaaaaaaaggcagagaaaagcccagaggctggatgggcttgaactggaaagagaccagcatgggtggcacacagagagtgacatggtaggagaccagattggggagcagctaggggaacgggcacaagccaggtcacagaaagccacatatgcagaagtagggagtttggattttatcctgagtgtggtgggcagtcattaaaggaatttgagcagggagggaatggtgctgtgagctgattaggtttccggaagatcccccccatggctgcttcgaggaagactgtggggggcaaaaagaggggggatctgagacccactggtaggctgtactcgtttgggacggacgatggtgatggcctggagtaggagctggtagtggcatggaaggaagtcggtcgagtcaggacttatttgggaggcagaatagacagggcttgtcgggaaatcgtgatcggcaccgggttcagtcactgagataagtttgagggtccactgttcttggagtggcgggggtagggctggagttttggactcctggcgctacctacttttttgggccaggaagactgtagagtccagtttcggaaccctgcctagcaagattttaagaatggcccaccacactactcaaaacagggtcttcgtccccttccccgcagtccggggagtccggaaccgcaggaattccgcccccacccccgactccgcccccgggtcccggcgccccctagcggtgcccaggccggctttcccccggggattctggcccctctgaccccaggaccccttctactgccccgattcccggctgtgattcctgccggcctcccggcgccgtgcgagccgggacccctggcgggctgttctctgcgcccggcctccgctcgcttccggcagtggaggcggctcctcccgaagcggcggcggcgggggcgggtgagtcacgcagccggagccaagaagccggcgcctccgcccccttctcggactgcggcgtgattcacccggcccggccggggcagacagcacgtagaggtccgtgcgtctcgatcccgggcagccccggcgggcacctgtcggacccagggatcgaactctgtgaaggacccggccgctggtagcccttctgttcccaggccccttcatttacataccttgctcactagcggccaatcagaacgaagaggtagccacccacaaccaatcaggaaacggcggcggcagcatcgcttgttggctgtcctccggaaacccgcgcctgggtcgcgagacgcagttctgactccggctcacgactccagactcctaactacccttagcgaccgcccactctcgtggctgccccgccctccgccccagggattggccctgcatggtgatgggcggagcttgtagggggcggattctgaaggaggggcttcagggcgcatgcccgggcagctgcgcgagtgaggggtggaaagaggtggctttttactccggggaacggtggcgagtgggggcttttgcctctcaaaatacgagcccctcacaactacccatgcacctgccaaacccggcaattaagcttcttacacatccagccccgacaggggtctacactacagataatgcccgggttcaaattccgactccggattccccactcactggatgcgtgaccttggaaaaatgatcaacctcttcaagctacacaaagttaaatggggatcgtcttgcctacctcttgacaggatactttaagtaggatcgtatctataagaacacaataccacactcaagcaatgctggacagttggacttaattgtggttaaaggcgggagtgaggtgggagtgcgataccaacggaatcacatcccgggctccattccctaagcagctgtgtgacctgcggcaagtgttttaatcccttctggtctgtttctcctttaaaatgagagaaaatagcgcctagtttacaggattgtttttaaggattaaattaattcatgaaaaatcttcagagtggggtgcaacatgttttgtgttttttttttttttttcattttatttatttatttatttatttatttgagacagattctcactccgtcgcccaggctggagtgcaggggcacgatctcggttcactgtaacctccgcctcccaggttcaagcaattatcctgcctcagcctcccgagtagctgggactacaggcgtgcgccaccacgcccggttaatttttgtatttttagtagagatggggtttcaccatgttagccaggcaggtctcaaactcctcacctcaggtgatccgccctcctcggcccctgagtgttgggattacaggcgtgagctaccgcgcccagctgcttattatttttttctttactttttattttattttattttgcttttgagacagggtctcgctctgtcacccaggctgaagtgcaggggtgccatctcggctcactgcagcctcccaggttcaagccatcctcctgcctcagacccccaagcagctgggactacaggcgcacaccaccatgcctggttagcaacgttgtttctttgttagtagtaatagctgttgtaataagacaagctcttagttcaaggtggatagacatgcaggatggggctagaggtagacagggtataatactcctcccatggccggatgcagtggctcacgcctgaatactctctcacctagatttaattgatagttgttagctaggcaacaactgtaatccagtactttgggaggccaaggcaggagggtcacttgagtccaggagttcacttgagtccagcctgggcaacacagtgagatctcatcactacaaaaaaatttaagaattagccaggcgtgggccgggcgtggtggctcacgcctgtaatctcagcattttgggaggccgaggtgggcagatcacgaggtcaggagttcgagaccagcctggccaacatggtaaaaccctgtctctactaaaaatacaaaaaatcagccaggtgtggtggcaggcgcctgtaatcccagctactcaggaggctgaggcaggagaatagcttgaacccaggaggcagaggttgcagtgatccaagacagcgccactgcactccagactgggcaacagagcaagactctgtctcaaaaaaaaaaaaaaaaaaggattagccaggcgtggtagcatgttcttgtggtcccagctgcttgtggggctaaggtgggaggattccttgagcccaggaggtcaaggctgcagtgagccatgttcatgccgctgcactctagtctgagtaacagaacaagaccctgtatcaaaaaaaaaaaaaaagaaaaaagtagtagttggtaacattgtgctaagttccctttatctacatatgtgtatatattgtttcttttgctaaacctttggagagtaattgcaagcatcttgatattctacccttaacagctcaggaggcatctcttaagaataaggacattaggccctgtgcgttggctcacacctgtaatcccagcactttgggaggctaaggcgagtggatcaccggaggtcaggagttcgagaccaggctaaccaatatgatgaaaccccgtctctactaataatacaaaaattagccgggcatggtggcatgtgcctgtaatcccagctactcaggaggctgagacaggagaattgcttgaacccaggaggtggaggttgcagtgagctgagattgcgtcattgcactccagcctgggcaacaagagcaaactccacctaaaaaaaaaaaagaataaggacattcatgtacaagccacaaaaatactatttcacatctaatagaatcaagaattccacaatatcacctaatcaaatctctccaactgacccaagaatatcctttatagttgctttcttttctccaaaatcaggatccaatgaaggttcacatgctaatttggttgtaatgaagaaattacatactatattttattctcgaatattcccccacccaaatcccttttttttttttttttttttttgagacagagtcttgctctgtcgcccaggctggagtgcagtggcatgatcttggctcactgcaacctccatttccgggttaaagtgattctcctgcctcagcctcccgagtagctgggattattggcgtgcgccaccacgcctggctaattttcttgtgtttttagtagagacagggtttcgccatgttggccaggctggtctcaaactcctgacctcaggtgatccacccgctttggcctcccaaagtgctgggattacaggcatgagccaccacactcagcctcaaatcctttttgatgttttgttgacattgaatttctggcaaaacagactagtcatgctgcatagtgtcccacattctggatttgtctgactgtgtttaatttgttcctctctttttccaataagctggaggttgggtctaggggcctggtgagattctgcttatgcagtgaacagggagactccacagggtgtgtcctaatccttattaatgtacttcctaatcctaacgcattatagtagttggcaccagtgtcaggatgtcccaccattggtaatgcagagtttcatcacgtgattaagattgtgagggttacatcgtaaaataaatttatcctttctagttagcaaataacctttgggatgatgctttagagcctgtgaagatcctatctccaagatgtatgtggtggctcatgcctgtaatgctggcactttgggaggccaaggcgggaacttaagcccaggaggttttgtgatttttttttttttttttttgagacggagtctcactttgtcgcccaggctggagtgcagtggcacgatctcggctcactgcaagctccgcctcctgggttcatgccattctcctgcctcagcctcctgaatagctgggactacaggtgcccgccacctcgcccggctaattttttttccttttttttttttttgtatttttagtagagacggggtttcaccatgttagccaggatggtctcaatctcctgacctcgtgatccgcccgcctttgcctcccaaagtgctgggattacaggcgtgagccaccgcacttggccagttttttttttttttttttttttttttgagatggagtcttgctctgtcgcccaggctggtgtgtaatggcgtggtcttggctcacttcaacttccgcctcccgggttcaaggattctcctgcctcagcctcctgagtagctaggatacaggtgcatgccactatgcctggctaatttttgtatgtttagtagagacagggtttcaccatgttagccaggctggcctcaaactcctgacctcaggtgatctgcccactttggcctcccaaagtgctgggattacaggcatgagccaccttggcctcccaaagtgctgggattacaggcgtgagccaccacatctggctttttttttttggggggggggatggagtctctgtcacccaggctggagtgcagtagcacaatctcagctcactgcaacctccgcctcccgcgttgaactattctcctgcctcagcctcctgggtagctgggattataggcgtgcaccaccatgcctggctaatttttgtattttcagtagagacggggtttcaacatgttggtcaggctggtatcgaactccacccacctcgccctcccaaagtgctgggattacaggcatgagccactgtgcctggccagagcccaggagtttgagactagcctgggcaacacagcaagacccaatctccacaaaatactggtttttgtttatgttttgtttgtttttgagacggagtctcgctctgtcgccaggctagagtgcagtggcactatctacagaatactgtttttaaaaacttatcctagcatggtggcatgcacctgcagtcccagcttcttgggaggttgaggtggatcacttgagcccaggagtttgaggctgcagtgagccatgattgcactagtgcacgccagcctgggtgaaagagtgagaccccaaaagatcctgttttccactaacttttcacccaactgtttgagcattcattgacaattgctgcctgaattaactaccatagttagcatttttgagaacttactttggccaggagctttattcaaaactaaaagctcttcccacagctcaggaattaacaaatgagctacttgaagaaggttaagtctcattgccagtttatgggacgagtatttttttttttttttttgagacggagtttcgctcttgttgcccaggctggagtgcaatggcacagttttggctcaccacagcctctgtctcctgggttcaagaaattgtcctgcctcagcctcccgagtagctgcgattacaggcatgcaccaccacgcctgaccaattttgtatttttagtagagacggggtttctccctgttggtcaggctggtcttgaacttctgacctcaggtgatccgcctgcctcggcctcccaaagtgctgggattacaggcataagccaccatgcccggtccacgcctggctcttaaatttttttgtagtgatgagatcttaccatgttgcccaggctgatcttgaactcctggactcaagtgaccctcttgccttggcctcacaaagtactgggattatagttgttccctgtccaacaactatcaaataaatctaggtgagatagtattcagatgctcagaatactttttttccccatcttttctatgtgcttgaatttttaataataaaattaaggtaagatgctaattagaaccaggcccccactaggcaaattcacattttctgccctccagaatccatttttatggctggcaaaagggacgcctggacctggagtctcccagtggcttactccaggtcatacactgaaggaaaaggaaattttccttcatgcttgtagtttcagctgcttcagaggctgaggtgggaggatcgcttgaacctgggagacagaggttgcagtgagccaggatcaggctgctgctgcgctgtactccatcctgggcgacagagcaagactctgtaaaaaaaaaaaaaacaaaaaacaaaaaacaaaaaacaagaacaagagctcagaggaatcatctgattaatatatatttattaagcacctactatgtggtggccactgttgtagatggtgaggatacagcactgggtaaatttcacagagtctcccctctcatggaacagggtaggaggtgaagagagaaaatatatatgaaaacgaatgcattcattgatttgcaaacatttatgtcttgagccccttttgtgtgccagacactgttataggcactgaagaaagggcagtgaaattatagatgaaaatctcttatgggagcagatgaacaataaacaaattaccttggccgggcgccgtggctcacgcctgtaatcccagcactttgggaggtcgaggcaggccgatcacttgaggtcagaagttcgagaccagcctgaccaacatggtgaaaccccatctctactaaagatacaaaagttagccgggtgtggtggcaagtacctgtactcccagctacttgggaggttgaggcaagagaattgtttgaacccgggaggcagagattgcagtgagccgagatcgtgccactgcgctccagcctgggtgacagagcaagactctgtccgaaaaaagaaaagaaaacaatctaaacaacaacaacaacaaaaattgaaaaaaagacagcaaattaaatcaatttaatttgcatttttagtagagatggggtttcgccatgttgatcaggctggtctcgaactcctgacctcaggtgatccgcccgcctcggcctcccaaagtgctgggattacaggcatgagccaccacgtctggccagtttttttttaattttttatttgtagaagcagagtatccccatgttgcccaagctggtcttgaactcctgggctcgagtgatcctcatgcctccgattcccaaagtgctgggattacaggagtgagccacctggccgccgggtctacttcttttgtttcatcaggtctctgctgaattgtcacctcttcagacataacacatcctcctccccaaagctgcacatctctcagctcactgcaacctccaatctcctgaattcaagcaattctcctacctcagcctcccgagtagctgggattacaggcgcctgccaccatgcccggctaattttttttttttttaatagagacgagggtttcatcatgttggccagactagtctcgaactcctgacctcaagtgatccacccgcctgggcctctcaaagtgttgggatcacaggcatgagccactgcacccggtctgcttttttcttttcctttgcaattacctgctcctaaggtactagataatttgtgtggtttttttgttttgttttgttttgaaagtagcccggcgtgatggcaggcgcctgtagtcccagctactcgggaggctgagacaggagaattgcttgaacccgggagacggaggttgcggtgagccgagacggtgccactgccatctcaaaaaacaaaaacaaaaacaaacaaaaaaattagccgggcgtgcctgtagttccaggtacttggaaggctgaggtaggagaatcacttgaacctggagtttgaagctgcagtgagctatgatcgccccactgtactccagcctgggcgacagagaacgactctgtctcaaaaaacaaacaaaccaaaacaaatgagagaggtaggaaaactagaggaagagcattccaggcagaggcgagagccagtgcaaaggctctgaagtgctgcctgtcaggagacaaggccagggcagctggactgggagctgccgggaaggaggtccgagaagtgaggccttttagcctactctgtggacctttgttttttactccgagcgggatgagaagaccctggaagatgaatcgatgagaaaaataatttccgtttccgttcagtgacttgaagaaaacaaaataagacgggataatcgcctgtaaccagggtggtcctagagagagattcttcgaggcgttgacattggagctggggccagaaaatggagacggagccaggaattcaaaggctgggggaagggagaagaggagaggccgggcctggggaaatgaaaccatcggcgaagccaccgggcccggcaggcctggagagaagcctccgcctgctggggagggaggcagggaggggggtcgggaggcgcggcccgccccgtccggcctctggggagggaggaggcgccaggccggctcccggccgcggccgcctcccgggtaccccggccggcccagggcggagggtgggcagcggggagggactgggccttcccgccacgcccagggcgggccgcgggcccatcccccgccgcggaggagggcaggttggggaacgtggacactgccctcggggactcggttccttctgcagggccagcctttccacttctgtggccagttctttttaacaagtgcggtgttaaggaaggcgctgggcctctcggagcctcagttttttcatctggaaagagggtgctcctcttactggcctcatcgcggtgctaaggaactgtgcgattccccttcccagggttatcttcagggcaggcagagagctgcagggaaagggggagggcggggcacggtggctcactttttaaacaaaaagtttgtttgtttgtttccagacgaagtcttgctctgtcgcccaggctggagtgcagtggcgccatctcggctcactgcaaccttcgcctcccgggttcaagcaattctcctgcctcagcctcccgagtagctgggattacaggcgcccgccaccacacccggctaattttcagtagagacggggtttcaccatgttggccaggctggtctcgaactcctaacctcgtgatccgcctgcctcggcctcccaaagtgctgggattacaggcatgatccaccgcgcctggcctgtttgtttttgagacggagtttcgctcttgtcgcccaggctggagtgcagtggccccatctcagctcactgcaatctccacctctccggttcaagcaattatcctgcctcagcctccggagtagctgggattacaggcagctgccaccttgcccagataatttttgtatttttagtagaaatggggtttcactatgttggcgaggctggtattgaattcctgacctcaagtaatccgcctgcctcagcctcccaaagtgctgggattgtaggagtgagccagggcgccctacctgtttttgtttttgaaacagggtcttgctctgtagcccaggctggagtgcagcagtgggatttcctctcactgcaacctctgcccattatgggctcaagcgatccttctacctcagcctcactagtagctgggactacaggtgagcaccaccacacccagtttttttgttttttttgtttttttggttttttttttgagtagagacaggacctcagggccttgccatgttaccccaggctggtctcaagctcctgggctcaagcaatctgactgccttggcctcccaaagtgctgggattacaggggtgagccaacgtgcctggcccttcttcaggtttttacccaaatgtcaccttgtctcagacgccctatctggccatcctatgtaaattgcaacaccctcctcactcctctgctcccccctgcccccacagcatttatcaccacctggctgacttacacattttcacttctttttttttttttttttttgagacagagtcttgctctgtcacccaggctggagtgcagtggtgtgatctcggctcactgcaacctccgcctcccgggttcaagtgattctcctgcctcagcctcctgagtagctgggactacaagtgtgcatcacaatacccagctaatttttgtatttttagtagagatggggttttaccatgttggccaggctggtctcgaactcctgacctcaaattatccacccaccttggcctcccaaagtgttgggattacaggcgtgagcccccacacccggccttatttttctttttatttacttaattatttttgagacataattttactctggttgcccaggctggagtgcagtggcctgatctcagttcactgcaaccttcacctctcaggttcaagcgattctcctgcctcagcctctggagtagctgggattacaggcgccggccaccatgcccagctaatttttttgtatttttggtagagagggggtttcactgtgttggccagtctgctcttgaactcctgacctcaggtggtccactcgccttggcctcccaaagtgctgggattgcaggtgtgagccacagcgcccggccctatctaactaactatctatctatctatctatctatctatctatctatctatctatttggagtgggagtctcactctgtcgcttaggctggagtgcagtgctgtgatcacagctcactgtaacctccaactcctgggctgaagaagggatcctcccacccgagtcttctgaatagctgggactagcgtgcccagctaatttttttttaaaattgttttagagatgtggtcttgctatgttgcccaaagtggtcttgaattcttggcctccaataatcctcctgcctcagcctcctgagttactgggctcatagtcacgtgctgccatgcctggcattatttttcatgtgtatttcactcttcccccactgttaaatttcatgagagcaggaattgtctattttatttattttcctgctgaagagtgccaggtccacagcaggcactcaataaatctgagccattattggaatccttggcctgcctcaggctccctgacactttgcagtgtgaggcaggtattactccagatccttcagtttggaatatggtgtatatgaggaacagcagggaatggtgtggtgggagtataagagtgagggtgtgtaggggagatgagttcagaaaggtgggagggaaagttagtcattgctaggtctggagttcatttttttttttttttttttgagacggagtcttgctctgtcacccaggctggagtgcagtggtgcaatctcggctcactgcaagctccgcctcccaggttcacgccattctcctgcctcagcctcccgagtagctgggactacaggtgcccgccacctcgcccggctaatttttttgtatttttagtagagacggggtttcaccgtgttagccaggatggtctcaatctcctgacctcgtgatctgcccgcctcggcctcccaaagtgctggaattacaggtgtgagccaccgcacccggcctttttttttttttttttttttttttgagacaggacctccctctgttgctctgttccagatggagtgctggagtgcagtggtgttatctctgctcacagcctccatttcctgagctcgagcgatcctcccacctcagcctcctgagtaggtgggactacaagggcatgccatcagcccagctaattttattttagttttttgtagagatggggtctccctgtgttgcccaggctggtcttgaactggacacaagcgatcttcctgcctcagcctcccaaaatgctgggattacaggcgtgaaccactgcacctggccaagtttttcaacaacaaataattttttttttttttgagatggagtttcgctcttgttgcccaggctggagtgcaatggcacgatctcagctcaccacaacctccgcctcctgggttcaagtgattctcctgcctcagcctcctgagtagctgggattatagccatgtgccactacgcctggctaattttgtatttttagtagagacagggtttttccatggtggtcaggctggtttcgaactcctagcctcaggtgatccgaccgccttggcctcccaaagtgctgggattataggcgtgagctaccgtgcctgacccttcaacaacaaataattttggagagtgcagttgtgccaagcatagttctaggcacagaccaacacaaccctcagagttcccaggagagtaggaggctacctatagatgggaaataagtaactcgagattgggtagatgctactaaaacaaaatcagtccaggtgcagtggctcatgcctgtaatcccagcactttgggaggccgaggcgggcggatcacctgaggtcaggagttcaagaccagcctgaccaatatggagaaacgttgtctctactgaaaatacaaaatcagctgggtgtggtggcgcatgcctgtaatcccagctgttcgagaggctgaggcaggagaatcacttgaacccaggaggcggaggttgtggtgagccaagatcgcgtcattgcactccagcctgggcaacaagagtaaaactccgtgtcaaaaaaaaaaaaaaaaaattagccaggtgtggtggcatgtgcctgtaatcccagctactcggaaggctaaggtagaagaattgctggaactgggaggtagaggctgcagtgagccaagatcatgccactacactccattctaggagacagagcaagactccatctcaaaaaaaaagaaagaaagaaaatcaaacaagttgtggtggggtggtgacccacctggatgtgttgagctaggaagggcaaggaagacctccctgagaaggggatattgggattggtgaagctattggggaaaatgtccactgggaaaatttaacagttagggcaaaggccctggggtgagaaggagctggggtcaagggagcccagttgagtgatggagagagtgggagatggaactgagaaagttgtccgaagtgagaataagtcagtccttgcaggtcttggtggagctggcgctttattgagtgtgtcaagaagtcactggaggctgggcgtggtggctcatgcctgtaatcccagcactttgggaggctgagatgtgaggatcgcttgattccaggagttcaagaccagcctgggctacatggcacaaccccatctctacaaaaaatacaaaaattagtcaggtgtggtccacgtgcctgtagtcccagctacttgggaggctgaggctgaggtgggagaattgcttgagtccatgaggtggaggttgcagtaagctgtgattgtaccactgcactccagcctgggcgacagagccagagaccctgtctcaaaagaaaaaaaaaaaaaaaaaggcactgaaggtttcaaggaggaagacatgattcaattgccatcatattgggatgcagacctggttgcttaccttttatttttattttttacaattccacagcaagtatcacacctggttgcttttttttttttttttttgagatggaatctcgctctgtcactcaggctggagtgcagtggtatgatctcagctcactgcaacctgtgcctcctggattcaagtgattctcctgcctcagcctcctgagtagctgggaccacaggtgtttgccaccatgcccagctaattttttgtatttttagtagagacagggcttcgccatgttggccaggctggtctcaaactcctcacttcaggcaatcctcccgccttggcctccctaagtactggaattacaggcctgagccaccgcgcctggcctgtacctggttgctttctttagatcctctgggccacctcattcctctctctggattggcacccacctcttcaggttatccctccactttctgacaatgaccccttcaggttgagaaatctggctttgacccagaaaccacaagcaaaatccccatcctttctccacccatggactatactcaggtgttgttcctcctcgcagcccttccagaaaagtccctaatgctgtgtagctcacttgcttcatctcttcaaagaccattgtaaaggcatagcctgtacaggtatcacattacctcttccttcacttccttcacctccttctcctctcctgtatctcagcagcctgggctcgtacctccgaaataaagcatcagcacaggtcaggcacagtggctcatgcctgtaatcccagcactttgggaggctgaggcaggcgggtcacttgaggttaggagttggagacaagcctggccaacatggtgaaactgtctctattttaaaaaaaatacaaaaattagctgggcgtggtggcaagcacctgtagtcactgctattcgggaggctgaggcaggagaattgcctgaacccgggagtggaggttgcagtgagccaaaatcctgtcattgcactccagcctgggtgacagagtgagactccgtctcaaaaaaaaaaaaaaaaaaaaagcattagcactataaatctaatctgggctctgcttcctagccaactctcctaaagaggtcttttagtactgggggtctttgggcattttcttgcccctctgggctcagcagcacattcagtgacacatactccgtgtgactcagtttctccctcctgtgcccacccacgtggctggttagtctaagaagcaacatttataatagtgaaggacaaggctctggaggccatttcagcctagctccctggtccttgttcttcctagctgtgtggctctgaattaagtgacttgtcctctctaaacttctggttcctcctgtataaaaagtggtaacagtacttacttctatatgaggattaacagacttaattcaaataaagtggctagaacagtgctcttaacaagcactaatttttttctgaggctggagtgcagtggtgtgaccatggcttactgcagcctcaacctcccaggctcaggtgatcctcccaactcagcctccccagtaactgggactacaggccgccatgcctagctcctttttgtattttttgtagaggcagtgtttcgccacatttcccaggctggcctcaagcagatcctcccaaagtgctaggattccaagtgggagctagagcactcagccaacaagcactcaataaatgtcatgtacaatgatacacctaccccagctatggcacggaagtggtgctgatgtttaggaacttaccaggtccctcccactgacccagtgaagtttagaaacattagacaacatccctccttccaaaatacttttatttaaaaaaattacaaacaatccaaaaaaaaaaaaaaaagccaccacaaactctgcctttcttttaaataacccggcatggagcagtttggtttccaccctattgcacgtggtccggcctggttatgaaatcaggaggctgctgagactggggtcctgccgaggaagtggggttcagcctggagggaggacaccagcccctcccaccccctcaaggtgcaagaggcagagcctgggtttctatagcaacctggcagcacatccctgtcatccttcgacaggcccagctttctttatcttccctgaggccccagtggtcacaggggagtgggaactagcaggaaaggtggaagaaatgtgtaagtggaaaatcagactcccagaaacagagtctcgttaaggcatttggaatagataaattaattcaggaagacccaccttcacagaaggtcggggtaaccagacacacacacacatgcaagacagtttgtggaaccctgaaatgggaacaaaggaggccatagtcactgcttcgagcccccacaaaaacacacacccagagttgcattcagggatccaggccaccgaagatgacatgaggaaggatcgatcccctctatcacagttttaggaccccagaatgatttccatgatgtgatccagttcattccactcccaagaacctggggcacagaagaggttgtgaggaggctctggtggggcccgtgcaggctccttttctaccgcagatgtgtcaatgtccagaaagaagtcatccaggccagagtcccccaagtaccgggagctcagagcttctaagaagactggatcaggctggggtggcacttcattctggaggccaaggggagtcactggattctgagggggctcagtcccatccatggaggtgtccagctccctgaggatagagccaatggtggctgacagggagaaatcctcctcgcccaggaagaggggctcggggggcagggcaggggcgggagccaggcgaagtgcagcctgcagctgttggagggtgttatggatgaggacatgcctgcggaggctgggtgctcgggggcccaggctgcgctggactttgtctagggagatgcggagcagggcttgctggtagctctgaaggcctgctggactccactcccacctctcctcctcctcttccaaatcagagtgtttcctcttcaagcctcccaccatgatgccctgtagagagaagaggcgcataggggaaggtcagacaccagacaccgtagtgctggctcatatcccactttctcaggcctattgagttgttagtgatttttaatcatcggaatctcagtttactgatgtataaaatgaaggctgtctgaatcctacaagtttaagaaggtgagtacatatacgattaagaaaataagatctggcgttacgtacagctagatttaaatctcacttacttgcctgttgtggcctcaaacagtgaatttacatccatgagaatcaatttcctcatctgccaagtacggatcctaactcaagttcctctaagccttaaaactgttcttccacaatattaatttcttcaaacatggagcacgaaagacaagtgtggagcacagagacctggattggaagtagggaaccccaaatctgaattctgtattggaaactgctcagctgcgtgatcatgggaagtgatctgaatgagtcaattctcagggcctcagtttcctcatctgtaaaatagggactgtaaaaaaatacttctcaccacctctgtcaaggagatgccacgtatctatagggcccaccacaccggaagtgcttaatgaacaagagttgtgtttgttttttgttagagacagggtctcgctctgtcgcccagggctgagtgcagcagcgctatcacagctcactgcagtctcgaagtcctgggctcaagcgatcctcccgcctcagcttcctgagtagctgggattaccaccacacccggcctcgatcaagagttaattgccagttattcgctcaacagatttactgagtgcctactatattcgaaatctcctggagccctgttggggaacctatgttgagattcttcttcaacagtcgggatatttctatgtcctcttccttaaccgactgggagcgctcccaagagtaggaaaggggcctgtctcattccctctgcccacgctttcagattcccccaaagcgcgccccataggaaaacttgctagaactcagctcagaccaagccccgccccctcggaggtcccactcaatcagaccgcgacactgtaaggccccgcccccccatgggtccttacagagcatccaggaacgccccaatttggcccaggggcttctgggaaacgggggccaacagccgccaggtacacgaattgacgtcgagcacgcactacaatccccagagggctccgcccgtccaggggacgagccacccccctcaccccgctctccctcagggcatgcgcacaggggcacaggcgggtgggggaagggaacctggacgtccagctgccggcgcctgccgagccccgccctccattgcctccggggccgcgagtctgagctccaggcccggaacacccctcccccaccccagactccggctctaaatttgctttctcccggtccctctgttccttgaaagtccgcgattctccttccaaactgcccttggatccagagacccagatccgaacacatcgctcaaagacgacaatgctccgatctagttcgggagactacgtatcctaattctgatacttcctcccacttctcctagtctcctgactttcaaacgcccctggacttcacctccaaactcgctgtccggctccaagacccgaacattgaactcttcccggcaacctccttcccccgccagtgcgtcttggagtcccaagaatccttgaccctagttctctcgcttctccaaatactcagaatctcagctccgtacctctcacaccttttccagaacacgataaagccccgaattcaacccgtccggaagacccaagtggaatcgaatctccaggttccctgtctcaaaagttcctcccctctgttctctcgcttctccaaaagcccaacgtcccagcttcaaactccctccacttgaaaatactgccccaacaacctcgcctcccctcctgggtcttgaactcagtctcaggtccccagaccctccctatcatcaccctgaatctgaggccccctcccccggtcccacccagaccccgcctccgcaagtccccggggcgcgcttctctctcccccagcctaaggtaaattcccaagccaggcgaccactcctcaccgcagctgccaggttcgccacgaccacctcctggaacgcccacagcgttgcgacccgccagtgccaggacccaccagtgaccggttggagcctcgctcacctcggcggggcctctccgtctggcctctggcccaccagccccgccccggagccgagccgcgagccgcgattggctggagtcccgcccgccgcggggcgtcgattggctgggcggagccatccgcccgtgccccgagacgccggatccgcccacccctccctagcgccccgggccatttaaagaagtgcaactggcagggggcggggcagcgactccggggtggagggcggccggtccaacagaaccgcttccttccactcagctacagtcctcgctccaagatcgtcaccattgctccctgcggttcctttatggtaggcctggactccaccgtggagccagaggggctggcatgcccctccccaagtcgctgtgcaggcgggcggggccgagcaaccggaggaggccgcgcccccggggttccgagggaggacgctggggcgcgggggatgacgtagcggaagaccagccaatagagtggcgcggcccgcgttgcctaggcgatcgtagcctcgcccccttgctgcccctcccgccccctatacgttaccgcgcggccccttcttaatcctcaggttttctcagcacgtcctctggtggtcccacctgggtcttctgacaccctctttccttccccgctccatcaagatgactcctctgctactgttcatggcttcctacccaccccgaatacaaacttcaaactccttccttttgccacaaagcccctcacgaccttgcttgatgcgttctcctggttctctccgatcctgccccattgagtcacttccagtttttctaaaatggcttcaagctcccattcaccccatcaggaaaacgaaaggattttctctgtttgttttcttccctgctttaccccagtgtctacaacaatgccaggtacataataagttcgcaaacatgacaataaaaggcctctggatctttattattaatattattttttgccgggcgcagtggcgcacgcctgtaatcccagcactttgggaggcggaggcgggcagatcacttgaggtcaggagtttgagaccagcctggccaacaatggtgaaaccccgtctctactaaaaatacaaaaattagctgggcgtggtggcgcacgcttgtaatctcagccacttgggaggctgaggcaggagaatcgcttgaacctgggaggttgaggttgcagtgaaggcgagatcgtgccactgcactccagcctgggtgacagagagatgggggaggggggaggggggttttcttgtgttgcccaggttggttttgaactcctggcctcaagcaatcttctcgcctctggatatttaaacttgtttcctcatcctcaaaatataccctcaattcccaggctgcttctcagaacacatttcaaaggtttcctcctctccgaagccctccctggcagtccaggttgggttaggatccattctaggattccatggcctcctgtgccgccatcccagtcctggactgtcagttactatatggactgaggaacgccccgccgagggcaggtaccaaggatatctctgtcaaccacctcttggtctgcaggatcacctagcacagggctggacacgtagcaggtcccagtgaaagtttgctaaatgctcaggaatgtgacagaaaaataaggcagaaagaagacactgctagtgtcctgaaagcccacacccgtaatgctccgcccctacaacgagtttccctaaggggaggaggcagttttctccaggccacctctgggaagggaggtttaagcctcctcagaccagttcttgccggttggagtttgtcaaccaagtcatcctgatgtttgcaggataaatgggaggggaataggtaggtgggtggtgtgggttggaggtagggagagagaagtgtcttagctcacccaggcctagggaaggtgtccctgggaaaaaaagaaagggacagtaggttccaaaaaaggacataattaggaaggagcaattcttccccttcctcctccaaaacctgcgcctcctatagggtccacaactcaggaaagccctactgcatttgggtttttgtttttgagacggggtcccactccgtcgtggatgctggagtgcagtggcgcaccttggctcactgcagcctcagcctccctcctgaagcactagtgtaactctgtccccgggttacagccgtatgcttctttctgatgcctcccctccacccctcaccaactgtccacgcaggctcccaggcattcctcacacccactctctcctcccctccttacagttcctcctccaactccctctgggctatcagcctccattcctggacccttcctttccaccttcacagagtagccaaaggaagcttcataaaacacccaactgtcccccctgccttacttctctggtgctccactccttgcataaatcctcaaaataaagcacaaacttttttttattttcagagacagggtctggatctgtcctacaggctggagtgcagtggccaggccttgacctcctggcctcaagccattctcccgcctcagcctcctgagtatctgggactacaggtacacaccaccatgcccagctaagtttttaaaaattattttgtagagatggggtctcactatgttgcccaacctggactcctggcttcaagccatcctcccacctcagcttcctgagtatctgggactataggtgcacaccaccatgcccagctaagttattattattattattattgagatggagtctcgctctgtcacccaggctggagtgcagtggcacaatctcggatcactgcaacctccacctcccaggttcaagcgattctcctgcctcagcctcctaagtagctgggattacaagtgtgcatcaccacgcctgggtaatttttgtatttttagtagagacagggtttcaccatgttcgccaggctggtcttgaactcctgacctcaagtgatctacccgcctcggcctcccaatgtgctgggattccaagcatgagccaccatgcctggccagactcaataaactgttactgggcggggcgcagtggctcacgcctgtaatcccagcactttgggaggcgaggcaggcggatcatgaggtcaggagatcaagaccatcctggctaacacggtgaaaccctgtctctactaaaaatacaaaaaaattagctgggtgtggtagtgggcgcctgtagtcccagctactggggaggctgaggcaggagaatggtgtgaacctgggaggtggagcttgcagtgagccagattgcgccactgcactccagcctgggcgacagagcaagactcggtctcaaaaaaataaaaaaataaaaataaactgttactgaacaaatgaatgaatgcataacaagcaaatcttacacagaggcaggcagacacaccaaaatactcagacagaggcagagagaggaagagtcacacagtcggtttctctagagtaatttgaagctcttggctcaacatttattgcccccttcctttgctcctcatgtcccagaatgccaccctcccagatggggacagagtgctactggtactggtgggaggggtaggtgctgtgtccgtcgtactcatcggtggtgaggcagcgcagcatgaaatggcccaggtcatgtttggagatgacccttgagggccctcgtccatccagggtcactgtgtacgccccagttagtggctggtctcctatgaagtaaagacaagaggggctggataaagcagacacctttcccttcccccaaaattcgacccccagaaagaccttcccagggtgcctactgtgtgtccagcctgggtggtgtcacagccaagaatggactttccatatgcaggtgctcatctatatcctttgcttcattcattcgataaatccttattgattacctattgtgtggccaggtgctgggcacccaagcaagggacaaagcagacaggaatcccctgccctggccagtggcggtggctcatgcctgtaatcctggcactttgggaggctgagacaggagtatcactcaagcccaggagtttgaaactatcctgggcaacacagggagaccctgagtccactaaaaatacaaaaatcagccgggtgcagtggcatgcccctgtagtcccaactactcaggaggctgaggctggagaattgcttgagccagggaagttgaagctacagtgagccatgatcgtgacactgcactccagccgggacgacagagcaagaccttgtctctaacaacaacaacaacaaatatatatatatatatatatatatatatatatatatttgtcagatagatatatatctgtctatctgacagtaaccaactaaacttagggatacaatgtaccatcacccaaacagagacaggctggaattatgcacagtatggaacacacacccttggctgtgtgtttgcttgggacaaagcagacaggaagctcctgccctggctgggcacagtggctcacgcctgtaatctcagcacttcgggaggccaaggtgggaggatcacttgagctcaggagtttgagaccagccaacatggcaaaaccacatctctacaaaaaatgcaaaaattcgctgagtgtggtggcttatgcctgtagtcccagctacttgggcaggagaatcacttgagcccagaaggcggaggttgcagtgagccaagattgtgccattgcgctccagcctgggctacagagggagaccctgtctcaaaaaaaaaaaaggaacacacaccttcacccatgtggcattcctgcccaacatgtttaatctgaatctgtgacaaaacagctagaaaaatccagaatgtgggcctttaaagtcacctggcctggttaatgttatgagaaacttaaagaaaaagggcagagtgggttgaatttttttttttcttttttggatagagtcttgctctgtcacccaggctggagtacagtggtgcaatcttggctcactgcaacctccacctcccaggttcaagcaattcttgtgcctcagcctcccgagtatctgggattacaggtgtccgccaccacacctggctaatttttgtatttttagtagagacggggtctcaccacgttggccaggctggttttgaactcctgacctcaagagatccacccgcctcagcctcccaaagtgctgggattacagatgtgagccaccacgctggcctgacagttggggaaattttactacggagtggatactaaatgatatgacagagtaaatgtcactttccttaggtgtgagcatgttttgtgtgcaaatatctttcttttaggagatggctgtctaggtatttaggagttaagtgcgacaatgttgcaattcctctcaaatgattaagccaaatatacatatgcatatatgttttcacaatatattcagcaaaatctaactatatattcatggagagagagagaggaggagagagggagagacaacaggataaaatgctaagcattgaacctaaacaaagggcttatgtgtattcataaacctttaatgctttcaaatcgggaggtgtggaagttttcacacacttggctgggcgtggtggctcacgcctgtaatcccagcactttgggaggccaaggtgggcagatcacgaggtcaagagatcgagaccatcttggccaatatggtgaaaccccgtctctactaaaaatacaaaaattagctgggcgtggtggcacgcgcctgtagtcccagctattcggggggctgaggcaggagaatcacttgaacccaggaggcaaaaggttgcagtgagccaagatcgcaccactgtactccagcctggcggcagagcaagactctgtctcaaaaaaaaaaaaaaaaaaaaaaaaaaagccaggcgcagtggctcacgcctgtaatcccagcactttgggaggccgaggcgggcggatcacaaggtcaggagattgagaccatcctggctaacactgtgaaaccccgtctgtattaaaaaatacaaaaaattagccaggtgtggtggcgggcgcctgtagtcccagctactcgggaggctgggcaggagaatggggtttcaccatgttagccaggatggtctcgatctcctgaccttgtgatctgcccgcctcggcctctcaaagtgctgggattacaggcgtgagccaccgcacccggccattaatatctatcttttcttgtctttttctttttttttttagacagggtctcactctattacccaggctggagtacagcagcctgggcaacagtttattgcagccttgatctcctgggctcaagccatcctcccgcctcccagtagctgggaccacaggtgtgtgccacgacgcccagctaatttttttttttttttgtagagataagtctatgttgcccaggctggtctcaaactcctgggctgaagaaatcctcccgtcttggcttcccaaagtgatgagattacaggtgtgaaccaccatgcctggcctatgtatctatctatctatctatctatctatctatctatctatctatctatctaatctctatctcccatactagaaatgtaagccatggcggggcatggtgatgcaggcctgtaatcccagctactcaggaggctgaagccccagaatccatagacataatggattaaaccattagccagtggtaatcccctcaaccttcaatccctcaccactccccagaggtgaaagtcccaaccctgtaatccagccttagtctttctggtgaccagacctgaagctgcctaggggctgccagctctcagtgaactcattagcatagaaaaagacatttaccattttggagattccaaggattttaggagttgtatgccaggaaacagggacaaaggccaaatatatatgtcacaatatcataggaaggtttgcaattttagggtggtcagggaaggccttgcagatctccccagagggcaggagggaacaggcagatggcattggtgccaccaggtccctgccctgcttacctatgtgtggcggcatcacagccacgtacttcaggcctgattcccgcagcaccttgtgcatccggatgtggtcatcagtcacagcctgcagtcgtgggggcaccttggtagggtcccagagcaggaaagctggagggaacacagggcaggatcagcctgggctctcttgtctttttttttttttttttgagacagagtgtcgctttgtcacccaggctgagtgcagtggcgcaatctcggctcactgcaacctctgcctcccgggttcaagcaattctcctgcctcagcctccccagtagctgggattacaggtgcacaccaccaggcctgactaatttttgtatttttagtacagacagggttttgccatgttggccaggctggtctcaaactcctgacctcaggtgatccaccctcctccacctcccaaagtgctggaattacaggcatgagccattgtgcccagccaagggctcgcttgtcttgatgccaggacaaaaccctgccatggctgaccattgctttccagttgcaaaaacaggggagtcctctggggctcctctttccctcacaccccaggtaagagctgtctgctgatcacaataattccaaatctgacctcttctcactccgcctggtcctgtccactgttacctcttgcctggaccagcccagcagcctactccctggtctctcagcccctccttccctcctcccaaggagcccgtgaacacccctatcagttcacatccatagctccatctcactcagggtagaagcaaagtccccatggccagccctcaaggccccacctgatatggccccatcagccctctgacgtccttgcctactctgcctaccactctctcttacacgcctctgctccagccaggttctgcctcccagccttggcaatgtctgattcctctgcccctgatgcatttccctctcttttttattttctctgagacagggtctcattctgttgtccaggctggaggacagtggcgtgaacacggctcactgcagccttgactttctgggctgaagtgatcctcctgccttagcctcctgaggagctgggaccacaggggtgagccaccaaaccccactatttttttttttttttgagacagagtttccttccctcttgccacccaggctgcagtgcaatggcatgataccggccaagcctggctaatttaaaaaatttttttaggccgggtctggtggctaacccctgtaatcccagcactttgggagactgaggaggccagatcgcctgaggttaggagttcgagaccagcctggccaacatggtgaaaccccatctctagtaaaaatacaaaagttagctgggcatggtggtgcatgcctgtagtcctagctactcaggaggctgaagctggagaattgctggaacccttgaggcggaggttgcagtgagctgagatcgcgccacggcactccagcttgggagacagagcaagactccatctcaaaaacaaagcagaacaaaacaaaacaaaacaaaaaaaacacaaaaattagccaggtgtcgtggtgcatgcctgtaatcccagctattctcaggaagctgaggcaggagaatcccttgaacctgggaggcagaggttgcagtgagccgagatcgtgccattgcactccagcctgggtgacagagcaagactccgtctcaaaagaaaaagaaaaaaacattttttttgtagcgatggaggtcttaccaagttgcccaggctagttttgaactcccgggcttaagcgatccttccatctcgacctcctaaaatgctgcgattacaggtgtgacccaggaccctttgccatttccctctcgtagccacatggctccctgttttctttgcagactttgctcaaaggtcacctttccatgcagcttttcttgactgtcctgtttaaaattgcaaaatcctgtctcccccagcccagtttaccaatcccttttcttggggccttgttttctccctaggacccttcccctgccaccacacgctagagttatcctgtgactctatcacatttcctgctccaatcccagcccttagaagcatctggaacattgtaggtacttactaaatatttgttcaggaattagctttcaacaagctataacttggccaagctacaccagctgacatttatagaacttttacctcaagccaagaactatgctaaatatttttaggagcagtttggtgaatagttaaagagcttgggttttgcctaaagtcaagtactggatcgaccactggccagcttcttgtttcctcatgtgcaaactgggatgatataaattgttcaaaggctgggcagagtggctcacacctgtaatcccagcactttgggaggctgaggtaggaggatcagttgagcccagcagttctagactcacctgggtacgatggtgagacctgtctctacagaaaattaaaaaattagccaggcgtggggacctgtggtcttagctgcttagaaggctgaggcgagaggatcgcttgagctcaggagttcgaggctgcagtgagctgtgattgcaccgctgcactccagcctggacaacagagcaagaccttgtctcaacaaaaagaaataaataaatagtttgagtaatgttagtggttataaaaaggtgtgtcacagagaccagcctgggcaacaaagccagactctgtcgcaacaaaaaaattttaaaaattagatgggcatggtggcacatgcctgtggtctcagctactcaggaggatcccttgagcctaggagttggaggcggtagcgagctatgatgacatcattctcactgcaacctccacctacaagtttcaagtgattctcctgcctaagcctcctgagtagctgggattacaggcgtgtgccaccacacctggctagtttttgtatttttggtagagacggggtttcaccatgttggccaggctggtctcgaactcctgacctcaagcgatccacctgccttagcctcctaaagtgctgggattacagcgtgagccactgcgcctggtctaggatttcctctttacagatgagaaaactgcggtgcagagtgtgaagtgggtttttgtctgcagcctccagtctccagttcacaatctcaaatccagtctctaacttacccctagtttcttttttctttttttttttgaggcagtctcgctctgtcacccaggctggagtgcagtggcacgatctcagctcactgcaagctcctcctcccgggtttacgccattctcctgcctcagcctcccgagtagctgggactataggcacccgccgccacgcctggctaattttttgtatttttagtagagacggtgtttcactgtgttagccaggatggtctcaatctcctgacctcgtgatccacccaccttggcctcccaaagtgctgggattacaggcgtgagccacagcacccggctgttttgttgtgttttgagacagggtcttgctctgcagccaaggctggagtgcagtggtgccatcacggctcactgcaacctctgccttctaggctcaaaggatcctcctacctaagcttcccaagtattggggaccacaggtgtgtaccaccacacccagctaattttttgtattttttttttgtagagatggagttttgctgtgttgcccagactggtcctgcactcctggacgcaagcaatccgcccaccttggcctctcaaagtgctaggattacaggcgtgagccactgtgcctggccttactctgggtttctttctaatcctctcagatgcctccataaaaaacaatcctccccaagccctaatggataaactccaagctccttagatgacaaaaatctttctaatcttttaccttgacatttgaatatggagggaagattaaactctaataattagaggctggaagataattaaagtgtgacaatagcactgtggtgctggaagagaaaagtcctttttcttgggacttgccgaaggtgtctgtgggtgtgcaactccatttcaaatagtttaggaagtctgggcgcagtggctcatgcctgtaatccagcactttgggaggccagatcacttgaggtcagaccagcctgcccaatatggtgaaaccccatctatactaaaaatacacacacacaaaattaaccagatgtggtggcaggcacctgtaatcccagctactcaggaggctgaggcaggagaatcccttgaacccaggaggtggatgttgcagtgagccaagatcacgccactgtattccggcctgggtgacagaatgagactctgtctcaaataaaaacaaacaaacaaaaaacccaaatagtttaggagaacaaaaacaaaatctatttgtgtatgtgtatgtgcatagataaaccaattacaaaacacaatcacaattttaaaatcaggaatatggctgttggccaggtgcagtggctcaggtgtaatcccagcactttgggaggctgaggctggtggatcgcttgagtccgggagttcgggaccagcctgggcaacatggcgaaactctatctctaccaaaaatacaaaaattagccagccttataacccggtctcaaaataaataaataaatagatagatagctacaaacttaaaaataaaaaaagaaaaggaatatggttgttcacacgactattaacttttctgtttaaaaatttttataataaaaagttaaaaagtatattgaggacctacacattgaagtaagcagccatgatgtatgtaagctaacttcaaatgggtcagaaaaaaaacattgtgtgtctgtgaacagaggacggtaggtgtactggtgtcctttcaatttttctgtaagtttaagatcatttccagataaaaagttaagctggactcaatggctcatacctgttgccccagctatttgaggggctaaagtgaggggattccttgagcccaggggttcaagggtacaatgagctatgatcaggccactgcactccagcctgggtgacagagcgagaccttgtctctatgtttgttttttttttaatgaaaaaaaaaatcctggcacacctaagactttaatatttagaaaacaatctaaacaaaaaaaaatgagaaaaaagaaagcaaattaaatcaattttacaggtttgtctttttcatggaagcaaaacttaaccagttaaattggtttttaagacatgggagagtctggacgtggtggcttatacctgtaatctcagcactttggaaggctgaggtgggaggactgcttgaggccaggagttcaacatcagcctggccaacatggcaaaaccttgtctctaccaaaaatacaaaaattagcagggcatggtggcaggcgccggtaatcccagctactcaggaggctggggcaggagaatcactgtgggccacgatcttggtcccaggcaccatgaacccgggaggtggagtggcggttgcagtgagctgataccacgccactgcactccagcctgggcaatggagtcagacttcatctcaaagaaaaaaagacatgggagaaaaaaacaaaactaaaattaacagcagaccattccaatctgcgaacaaaagtaagaccttgtctctacaaaaatatcaaaaaattagccaggtgtggtggtgcatgcctgtagtcccagccgcttgggaggctgcagtggggaggatcacttgaacccagactgaggctgcagtgagccatggttgcaccactgcactccagcctgggtgacagaaagtctcaaaaaaaaaaaaaaaaagtgaaccattctgaaatcgcaagtttactcgtgtattacttttccatttcagagcttgaggaaaaaagccataaatgattttgcttcctaccctccaactaggtctggcctccaggcctctttgcttgctttgtcctctgcctggagtgtaattacaatcatcaggcagccctccctcatgccacttccctttccagggaggcaatttgtgtcatgaaacacacttgaggtcaggagttcgagactagcctggccaacatggcgaaaccctgtctctactaaaaatacaaaaattagctgggcatggtggtgcacacctgtagtcccagctacctgggaggcagaggcaggagaatcacttgaggcaggagaaccacctccgggaggcggaggttgcagggagccaagatcacgccactgcactccagcctgggcatcagagcaagactctatctcaaacaaacctcaaaataactataaataaataaataaataaataaatgattatacagggcaactatttgcttaatgtctgtgtccccataatcgggagctctgtgagggcagagacctagtgtctatccacagctctatcacttcctctgggaggcctaccctgacctctctcagcctaagtcggacgcctcctctgggctcccatagtcctgtagtttctcccattgtggccctatcccctctgcctgcctcccgatcccagctccgatgatctggatgtcagtttgatcatggatctgtttaccacctctctctgtgagccttgtgtgagcagggcccagggctgtacaggtcaccactgtgtccccagcatcacccagtaaggttcaggcacacagctggtgttcagtaaatgcacagtaacatggaatggcttcagcgtcacctttcagaggcccctgggctgcctccccagtaccccccagttcagccccacctccatgatcccaccacccacccgaggtgcaggccacgaccttgtccacaccatgagccttcatggctgccacaatgttccgggcgccctcggacatcactgtcgtgggaccttagaggggacagagagtggctgtcactggtgggcggcggcggcggcaggggtggcaggggcggggccgggggcgggggtggcgctgggggccgaggtgtaggggagggccgtgggcagagggggggctcagtactgaggtcattgcgggtgcccagcagcacgatgacagcgtcctgcccagccacggtcttgtccacatcggctgcctgcagaacatctcccactaccacgtgggccggccggggcccctctgatggcagcctggaggagtcccgcaccagcactgtcacttcgtaacctgtgggcaaagaggagcagagagcctggtcagtgggctggcactcttgggctccaggagctgggtcctagaagccaccatgaactctcaaatccatcccctcctctgttctggggaagtggtcttcaaacatttttggttttttctttttgtttgttttgtttttgagacagggtcttgctcacttgcccaggctgctgtgcaatggtgcagtcacagctcactgcagcctcaacctccggggttcaactgatcctcccatctcagcaccccaagtagctgggaccacagtgtgcaccaccacacccagctaattttgcaatcttttgtagagaaggggttttgccatgttgcccaggctggtcttgaactcctgggctcaggtgatctgcctgcctcagcctccccatgagccactgcgccgtggccttcaaacatttttgctggcatacctacagttgatgcttagtattgggctgattattaaaatagaccataccttggccaggcatggtggctcacgcctgtaatctcaacactttgggaggctgaggcgggcagatcacctgaggtcaggagtttgagaccagcctggacaacatgatgaaaccccattgccactaaaaatacaaaattagccaggcatggtggcacatacctgtaatcccaagtacttgggaagctgaggcaaaagaatcacttgacccgacaggcggaggttgcagtgagcagagattgcaccagtgcactccagcctggatgacaaagcgagactctatctcaaaaaaaaaaaaaaaaaaaaaaaaaaaaaaaaaaaagaccataccttcatgataattcataaataatctgaactgaagcctccaagcaccacaccctgtaaattccttaccttctatttattattattattattttttgagacggaatctcactctgtaacccaggctagagtgcagtggcacaatctcggctcactgcaacctccgcctcccgggttcaggcacgtgccaccacacctggctatcattattattttttttgagatagagtctccctctgttgcccaggctggagcacagtggcatgatctcagctcactgcaacctccgcctcccaagttcaagcgattcttttgcctcagcctcccgagtagctgggactacaggcgcatgccaccacatccaactaatttttgtgtttctagtagagatagggttttaccatgttggccaggctggtcttgaactcctaacctcaggtgatccacccaccttggcctcccaaagtgctaggattacaggcgtaagccactgtacccagccagcaacttccctaccctctaacaactaaagggttaatgcaggcattgcactggtctctgtctcccatccatggtcctggaagaaactgaggttctgagggggacatgggttgcctacagactgaccagtgctgggattggtcccagcccctgctgcccagccttactgctgggaagcccagccctcctttagtggtcattaaagatttttaatattgtcttagtatgttccttcccaaaataattttggataattttgtttctcttcaacacacacacacatacacacacattttaaagttcacaactaacatatttcttcctttgttttaaacattggcaaaggatgttaacatttgggtatactgtaatagcaacatatatatatatatatatatatatatatttagagacagggtcttgctctgttgcccaggctggagtgcaggggcgccaatcatagctcactgtaacctcaaattcctgggctgatgcctattataatcccagtgctttgggaggccaagacaggaagattgtttgaggccaggagtttgagaccagactgggcaacatagtgaaaccccgtctctgcaaaaaaaataaaaaaaatctagccaggtgtgctggcgcaacctgtagtctcagctactcaggtggctgaggctgtagtgagctatgattgtaccactgcactccagcctgggctacagaacaagactctgtctcaaaaataaataaataaattaaattaaattaaattaaattaaattaacaaaaagtttaggctactacctggcacagaaataagagttacctggtgctgggcgcgatggctcacgcctgtaatcccagcactttgggaggccaaggcaggtggatcacctgaagttggaagtccaagaccagcctgaccaacacagggaaaccccgcctctactaaaaatacaaaattagccaggcatggtggtgcatgcctgtaatcccagctacttgggaggctgaggcagaagaatcgcttgaacccaggaggtagagattgcagtcagctgagattgtgccattgcacgccagcctgggcaacaagagcgaaactccgtctcaaacaaaacaaaacaaaacaaaacaaacaacaacaacaacaataaacataaaaaaccaaaaaacccaaaaagacacaataaaaaaattaaaaaaagagatggggttttgcatgttggccaggctggtctcgaactcctggactcaagtaatctgcctggcatggcctcccaaagtgctgggattacaggcatgagctaccgagcgtggcctattacaccttgtaaccattttgcaactttatctcctggcctgatccaggcctacgtctccttcctggtccctttcctgggtcctccctgggctcctggacccagtcctgccctctccaatccatattccacacagcagccagacagagttctccacagtaatatttaagtgcctctctgctcagttgcctcccgcaagcctgaaatgccctgtgataaaacccatgctcctcatgccagccttccaggcccctcgggatctggcttctcctctccaggctctgctgaagcctctgccctcttcacccacagcacatttttttttttttttttctgagacggagtctcgctctgttgcccagtctggagtgcagtggtgcagtctcggctcactgcaacctccgtctcatgggttcaagcgattctcctgcctcagcctcctgagtagctgtgattacaggcgcctgccaccatgcctggctaatttttttgtatttttagtagagatggggtttcacgatgttagccaggctggtctcgaactcctgactgtgtgatccacctgcctcagccccccaaagtgttgggattacaggcatgagccactgcacccggccccaactgctcttctttcagttcctcaaatgcatggtgctgcttcctgcctcctggactttgcacgtgctgtgccctctgcctggaacaccctttaccctctttacccggtccccccagtaacttgtacttcctctgtcacagccctctttatgctgacctgcagcaaaccaagcaccctgtgggtccagggactgtgtcatgttttctgccatctccctgaacctttgtaaacacaaaagcacaggcattactgccccagggaccttgatccaaactccagctctgccacttaccagctgaggaacctcatgcaacctcttccgtgattggacctcagcttcctcatctctgaagtgaggatcacagcaccagcctccccgtgctatgtgaccacctttcataggggaatgacacaagatctgtgctgccctcacacatgggggagcagcaggggcttgcatgggccaatatgggcattctttttttttttttttttgagatgaagtctcactctcttgcccaggctggagtgcagtggcgcaatctcagctcactgcaacctccgcctcccaggttcaagcgattctcccacctcagcctccagagtagctgggattataggtgtgcaccacaacacccggcgaattttttgtatttttagtagagatggggtttcacggtgttagccagggtggtctcgatctcctgaccttgtgatccgcccaccttggcctcccaaagtgctgggattacaggcgtgagccatggtgcctggcctctttttaagctttttgaaaatctcagccattggccgggcgtggtggctcacgcctgtaatcccagcactttgggaggctgaggcgggcggatcatgaggtcaggagatggagaccatcctggttaacatggtgaaaccccatctttactaaaaatacaaaaaaaattagctgggcatggtggcaggcgcctgtagtcccagctacttgggaggctgaagcaggagaatggctgaactcgggaggcggagcttgcagtgagctaagattgtgccactgcactccagcctgggcggcagagtgagactcttgtctcaaaaaaaaaaaaaaaaaaaaaaaaaaatcagccatcaatacaaaaaatttcattgcctaacctggtgtacacaaacgcatacatatataattaaaatgagtttcacaaaactaatacttaacatgtgatacattttgatactatgtcatcatttgttaccctatattgttgatacacgttgtgaccatatgtttcagatctcattgtaactcacagtttgagaagcatcaggttgcaacaaccctgcaaggtaggtatcattatcctgtccacattgatggggaaactgaggcaattttaggcaaccgggccaggatcacacagctagtaggtagagaaggttgaatttttacctaagtaagtctgatccagagactgcaaaattcaatgctagtctaagtacctcctatataagatctcatttaattatcccaagagccctagggcaagtactaccagttttgtcatgatcttacacatatctaggtacacagatgacaaggcatttggtcacaaaggctgtaagccgcagagctggtgacttgaatgtgggcaggctggcaccagagttcatgcctgttaagactcttggccctacagaaccattgtgaactccagttaatccaagccccttctccctccctccctccctccctccctccttccctcccttctttccttccctccctccctccctccatccctccctccttttcttccttccttctttcctttcatcttgctgtgtcacccaggctggagtgcagtggtgcagtgatgcaatcttagctcactgcaacctcccaggttcaagcgattcttgtgcctcagcctcccaagtacctggaattacaggcacgtaccactgtgcccagctaatttttttttttttgagacagagtttcactcttgtcgcccaggctggaatgcagtggcgtaatctcggctcaccacaacctctgcctcccggattcaagctattctcctgcctcagtctgccaagtaactgcgattacaggcaccagccaccatgcccggctaatttttcgtatttttagtagagacggggtttcactatattggccaggctggtctcgaactcctgacctcgtgatccacctgcctcagcctcccaaagtgctgagattacaggcgtgagccaccgcacccagcctctttttctttctttttatgtatttttttaaatttgagagacagggtctcaccctgtcacccaggctggagtgcagtggtgcaaacacagctcactgtagccttgaactcctgagctcaagcaatcctcccacctgagccttctgagtagctgggactacaggcatgcatcaccacgcccagctaatttattttttttttgtatttttgtagagatggggtcttgctacgttgcccaggctagtctcaaactcctggcctcaagccatcctcccgccttggcctcccaaagtgctgggattataggcatgatccaccgtgcctggccagcccttccctttgctgagggggacagcaaagctgagagctgggaagagatttttcagagccacagctctgaagctccctaggctccagttcttaaccctctgagtgcagtcccagctatgaccagcagggtgggcgagtggaattcggtggaattagtggatttccaggtgactcagcgcctctcaacttctctctcttacttccttctccattactcccgaataaatgcttatcagcaaactggtttttactgagaggcccacagctccccattctccacaagtcaagatcctcacgtggtctccctggggaaggggagagttatggacctagagaagaactttcagagtccctccaagggagacagcagagtggggtcctgttggcctccacccttttggggcacgcagatagtcaatatcttcagcgtccccaaggcctgcaagggtggggccccatatctggaagtcccaggcccagctgggagttggtcaagtctgggctgtgggggcagggagtgctgggggatggttatccccttttctgccctctctcctggggcaactccaaattttcagccctcattgactttcccaggactgctgtccccaagtcttcactcatgtctctctgtgactccttcccattaggtactcgcagcaacctgaccccccaactttttcagtttccagcctggggacttgtggtggttaagagcatgagctgagttcaaatcccagtcctgtcagttaacagctgtgtgatattgggcaagtcactctctgggtctcagttttctcatctgtcaagtagggtgatactagttcccaccccattttgaaagctctcatgtgaagagacgacagagcaagcttggcttagtaaatcctctctgggagtgcgaacaaccaccaccacaaccacaataatgacaaccgcattgcataagagccctggacttacacacgactgtgccagtggagtcctcccggggctcccggggccaattcctctctggcttggactcacataaacttggatctcacatctttccccatttctgcccccgtggccacttgctttggcccctgagtcctcatacacctggctggggcgctcatggccccaatcagcctcggcccgaccccatggtgccccttcctaaagttctgcccgtctgtcccgtgacatgccccgcccgccccggctcatgcctgcttgcaccgcctgcgccagggtggtgagcccggtctggccagtggcgccgaagatcgcgatcttcttgacggccatcgtacgggatcgtgggggtgcaaggcctcagagtctcggcacgcgcgggaacccactggctgctgggcggtgctctctgccctactcaagccaggaacaacggggcggagctggctcgaagggccacgcctcagactctccgcccgcggctcaggtcaaggggcggggcctaacgcggatgggcggggcaggcgtcagcttgcattcgctcaccgtccagcaccgccctctctgcgcgccacttagactggaaggcggggccacagaaggccacgcctccacatagcaacaaatagagtggacggagccgagataacttgtcactcagcgccctgcctccgcgctccacctcccggagaggggcggggccaggcgagcctcacccacggcctctcgtagctcacgccccctctcccggagcctggagcggatctggggcgcactctaagccccagggcctcccagaaccagcaaggggagaaagttaggaggacagagtgtgtgtgtgcacttggatgtaagacactgtgtcacggcgtacctatgcacttatatgaccctgtgtgactcagtgacccggagggcaagcaggactgtgggtgacaccttgtgtcatcctctgagtgtgatcccgtgttacagtgtgactacacgtgcgtgacaccacgtgtggcaggcattgattctgttcttttgtgaccttgtggtgacaccgtgggtgacactgcgtcagcctgtacgatagggtgtgggacgtgtgaggtgtgctacatggaagcgtgagactaattagactgtgacagtgtgtgacaccacatgtctcgtgtaaggatgtgtgacaccgggaccccattcgagtgtgtggctgtgggtgtctgtgttgagctgctcattgtgaccccctgtgactatgatgtgtgaggtgcggcggtgcagcatgtgcggggcgactgctatgaaggttcgagtgtgtagagtgtgtgacactgtggctgtgaagctgtgcgtgatgtgtgggcctatgacactgtttgtgactgccggggagtgtgcggctgtgtgtgacaggtgcatttgtgtgtgacgccgcgtgggcggtggttaccctattggatttgtgtggtggtgggtgacaccgttccagtgtggacgccgcgtgtgacggcgtgagggtgtgaccccgtgagaccccacaggagggagtgacggcgcgcaagcgcgtggatgcgggggtgagtttgtgcgccgaggcccccgcgagtatggcagcgtggcgagcgtgaccccgtgggagtgtgcagcgcgtgacgccgccgtgccctcgcgagtgcagccgtgcaccccacgccgcggccgggtgtgactgcgcgtgggcctcgggcggcggggcgcggggaccgcgggcgggagggggtcccgggggcgcgctgagcgcggcggcggcgcgagagagggaggcgcggcggcgcatgcggatctggctgagccgcgggccggcggggccgagctgagccgggctgggccgggccgggccgggccgggcagcggacgccgacagggagggcggtcggtcgcggcgagcagcggagacagcgacgctggcggccgcgggcccaggtgagctgctaggggggccgacagcccctcccccaagtatgtccccacctggcgagcatccctcctccgcgcgcacggggcatggctggagccccgggtctccccggctggagggaggcaaagggtcgagggcaggacgagcccacaacccccccacccggtctagcttccgcgccacgcgtgggtcttacccccaggccttgtccttcccaggccccctccttgggcgcagtgtctggaccgcagggagagaggcgcggcctgggaagggttaaagcctctgatgccaccgcagcccagcgccccaccagcctttgcgggggggggggggtgttggggggaggctcgcaggacaccccttcccggcttccctattacctgctcccttccttcccattcaatcgcgttatggccagagctgatcctcggcctggccagagggctaacaggagtgctaagggcctccccatctctaagtgtcttccactgaagaaaacagctgtaaccaccgtttaacagggagggaaactgaggcacagaaaggccaagttaaagatactcggttaaagatacagcaagaataaagcggaacttgaactcatttctgtctgactccagaagaggcaaatcgatttgctgagatgtgtgaggaaaagatgaagaataatagcaaggaacatgtatcaagggcttgcagtgtaccagataccatgatccctgcattaataacttacctcttcaaacaccgctaagaaacgggtacgattatcattacttttttttttttttgagacggagtttcactcttgtcacccaagttggagtgtaatggcgcgatcttggctcactgcaacctctgcctcccgacttcaagcagttctcctgcctcagcctcccaagtagctgggattacgggcatgagctaccatgcctggctaattttgaatttttagtagacatggggtttcactatgttggtaaggctggtctccaactcttgacctcaggtgacccacccacctccttggcctctcaaagtgctgggattataggcgtgagccaccgcctggcctacccttttgtgtgtgtgtgacagagtttcattctgtcattcaggctggagtgcagtgagtcaatctcagctcactgcaacctccatcccccaggttcaagcgattctcctgcctcagcctcccaagtaactgggactacagacacgtgccaccacgcctggctaatttttgtattttttttagtaaagaccgggttttgccatgttggccaggccggtctcgaattcctggcctcaagtgatccacctaccttgacctcccaaagtgctgagattataagcatgagccaccgtgccgggccatcattactattttgcagatgaacaaactaaggcccaaagagtggaagtatttcagccaaggtcacacaggtggtaggtagctgtgtgctcactttcacttttccatggaaggagggaagaacaaaaatggatttgggactgggcacagtggctcacatgtgtaaccccagcactttgggaagttgaagtgggcaaatagcttgagcccagatgtttgagaccagcctgagcaacatagtgagaccccctctctacaaaaaatacaaaaattacctggtcatggtggagcttgcctctagtcccatctactcaggaggctgaggtgggaggatcgcgtgagcacaagagttggaggctacagggagctatgattgtgtcactgcactctagcctgggtgatagagcaataccttgtctcagaaaaaaaaaaaagatttcaatgtgtccccctaagggacaatttccactctactcactctactgaccaagacttagaccctgccttcctagaattcagtgggttggcaattgtctgggtcttttgaggacattgatctcccaacttcctcctttgttagtcttttttttttcctttttcttttgagaaggagtcttactctgtcgcccaggctagagtttagtggcacaatctcggctcactacaaccttcgcctcccggtttcaagcaattctcctgcctcagcctcctgagtagctgggattacaggcacctgcaaccttgcccacctaatttttgtgtttttagtagagatggggtttcaccatgttggccaggctggtcttgaactcctgacctcgtgatccacccgcctcagactcccaaagtgctaggattacaggtgtgagccaccacgcccagccgttagtcttagaatcaggcctgggggcccagaaggtaaaggagatacatctaatgtcacttaaccctttaaatttcttctctttttttttgttttttttgagatggagtctcactctctcacccaggctagagtgcagtggtgcgatctcggctcactgcgacctccgcctcctgggttcaagcaattctcctgtctcagcctcctgagtagctgggattacaggcatgtaccaccatacccggctagtttttatatttttagtagaggcggggtttcaccatgttggccaggctggtctggaactcctgacctcaggtgattcacccaccttggcctcccaaagtgctgggattacaggtgtgagccactgtgcccggccaatttcttctttttttaaataattttttgttttctatttttttattttcatttaatttaattttattttttctgagatggggtctcactctgtcgcccaggctggagtgcagtggcacgatctcagctcactgcaacctctgtctcccaggttcaagcgattctactgtctcagtctcctgagtagctgggattataggtgcacaatgccatgcctggctaatttcttgtattttagtagagatggagtttcaccaagttgcccagactggtctcgaacccctgagctcaggcaatccacccgccttggcctccctaagtgccaggataacaggcatgagccaccgtgcccggcctatttttatttttttatttttgtttgagatggtgtctcgccctgttgcccaagccggagtgcagtggtgccatcttggctcactgcaacctctgccttcccaggttcaagcgattctcctgcctcagcctcctgagtagctgggattgcaggcatgcactaccatgcccagctcatttttgtatttttagtagagatggggtttcaccatgttggccgggctggtcttgaactcctgacctcaagcgatctgcctgccttggcctcccaaagtgctgggattacaggtatgagccactgtgcctgccccctccactttaaatttttcttcttcttcttcttctttttttcttgagaatgagtcttactctgtcgcccaggatagagtgcagtggcacaatctcagctcattgcaacctgcgcctcctgggttcaaacgattctcctccctcagcctcctgagtagctgagattacagtagcccgaaaccacacccagctaatttttgtattttcagtagagaccgggtttcaccatgttggccaggctggtctcgaactcctcacctcgtgatccgcctgcctcggcctcccaaagtgctgggattacaggcaggacccactgtgcccagccccattaatgcaaatattctatcaccttttttttttttgagacggagtcttgctctgtctcccaggctggagtgcattggcatgatctcggctcactgcagcctccacctcccaggttcaagtgattctcctgcctcagcctcctgaatacctgggattacaagtgtgtgacaccacgcccagctaatttttgtatttttagagacagggtttcaccatgttggccaggccggtcttgaactcctgacctcaggtgatctacccatctcagccccaaaaagtgctgggattacatgcatgagccaccgcgcctggccctatcatctatgtttgaatcctagatactaactggctgtgtaaccttggaaaaatagatcaactcctctgtgcctcagtttcctcctctgtaaaataggtgtaataatagccaactgttagggaattaaatttgtggaaataataagagaaggtacatgaagtactgaccacagtgcaagtgttcaatatgttcattattgttattactgcattacagaactctattgttctaataataacagtgacaatttgctgagcccttaatatgtgccaggggctaagccatgtgttttatcacatcctgtgaagtggtgagggtgaacattattattattattatttagaaatagggtatcgccatattgcccagtttggagtgcagtgtcactattatagatcactgtagccttggcttcttgggctcaagccatcttcctgcctcagcctcctaaatagctgggactacgggtggcaaccaccacatttggctaatttttaaatttttttaaaagacagtttctggctctgctgcccaggctggagtgcagtggcgctatcttggctcactgcaacctccacttcacaggctcaagccatcctcacacctcagcctcctgagtagctgggattacaggcacgttgccaccacatccagctattttttttttttttttttttttgagacagagtttcgcttttgttgcccaggctggagtgcaatggcatgatcttggctcaccacaacctccgcctcccgggttcaagcgcttctcctgcctcagcctcccgagtagctgggattacaggcatactccacctcgcctggagaattttgtatttttattagagacagcgttctccatgttggtcaggctgatctcgaactcccaacctcaggtgatccgcccgcctctgcctcccaaagtgctgggattataggtgtgagccaccgtgcctggccaatttttgtatttttttgtagagacagggtttcaccatgttgcccaggcttgtctcgaactcctgggctcaagcaatccgccctcctcagcctctcaaagtgttgggattataggcctgagccactgcgcctggcttatttttatttttatagagatgaaatcttgctatgttgcccaggctggtctccaacccctgggctcaagcgattctcctgcctctgcctcccaaagtgctgggattacaggcatgagccactgtgcctaggccttatcattgttattatgtccactttaaagacagagaaattgaggacaagagaggggacaggactcaaagccagtcactgttagaaatgagacttgatcctagacctaacctacctctccctatgtccaggcctcaccttccccgatggcgcaggtaccaggggaagtggacaacatggagggcctgcctgctcctaacaacaaccctgctgcccgctgggagagtccggatcggggctgggagcgggagcagccggctgcgtccaccgcagcggcctcgctctttgagtgctcccggatcaaggccttggcaggtacctggaggagggctggggtgggatgaggaggagggggaagggggaagggtgcccgagaaccttggtggctgggagggtgggaaaagagaccagcactgtccaatagaactttccatgatggtggaaatagtctatatccataatgtaccatataataatcactagtctctgtgacttttgaatgctagaaatgtggccagtgctatgtgacagcctttgagttttaaattttatttagttttaattaaatttatttatatatatattttttgagacagagtcttattctgttgccccggctggggtgtagtggtgagatcttgggtcactgcaatctccacctcaccggctcaagccatcctcctacctcagccccctgactagctgggactacaggtgcccgccaccacacccggctaattctttttgtatttttagtagacaccgggtttcactgtgtttgccaggctggttttgaacttctgatcttaagtgatccacttgctttggcttcccaaagtgctgggattacaggcatgagccactgcacctggcctggtgttttttttttttttttttttgagacggagtttcgctcttgttgcccaggctggagtgcagtggcgcgatctcggctcaccgcaacctccacctcccaggttcaagcgattctcctgcctcagcctccctagtagctgggattacaggcatgtgccaccacgcccagctaattttgtatttttactagagacggggtttctccatgttggtcaggctggtctcgaactcccaacctcaggtgatccacatgtctcggcctcccaaagtgctgagattacaggcatgagccacggcacccggcctgttttaattaaatttaaatagccacatgtggcttgtgactgctgtataggtcagcacagccttagagccttagaaatgtacagtcccagaatggtgggactctgtaagcatattcccttagaatcccgaaatgcagagccatcagatccttggaacttgaaatgtctaagagattcttagacctcttgaaatgaagacctctggcctggcgcggtggctcacgcctgtaatcccagcactttgggaggcaaaggtggacagatctcttgagtgcaggagttcgagaccatgttcgccaacatagtgaaaccctgtctctactaaaaataaaaataaaaaaaaaaattagccaggcgtggtggcatgcatctgtagttccagctatttgggaggctgaggtgggaggatggcctgagactgtgaggtggagattgcagtgagtcaagatcgcgccactgcactccagccccagcagtaaagcaagaacctatctcaaaaaaaaaaaaaaaaaaaaaaaaaaaagagctttggaaatgtgaaacgttatcatcacagacctaagaaattttagtcattgttccctaggatcataggcccttagaaactgaaactgtaatacacaggaacctttgggacttgataatactaaacctttggagtttccaattagaaatgtggatcttgagaaatctgacatagagtgaccaaaaccttcctgcttttaccaccgaaactctcagccttgggccaaccagtacagtgggtcaccctaccattttttttttttttttgagtcagggtctcactcttcacccaggctggagtgcagtggtgtgatcatggctcactgcagccttgaactcctggactcaagtgatcctcccacctcagcctcctgaatagctggaactacaggcatgcgccaccatgcctggctaattaaaaataatttttttttttggcgaagcatggtggcggatgcctgtaatcccagcactttgggaggctgaggcggatggatcacttgagatcaggagtttgagaccagcctgaccaatatggtgacactactaaaaatacaaaaattagatgggtgtggtggtgggcacctgtaatctcagctacccaggaggctgaggcaggagaatcacttgaacccgggagatgggggtttcagtgagctgagatcacaccatttcaatccatcctaagtgacaagagcttaactccgtctcaaaacaaaacaaaaaaatttttttgtaagatggggtcttgctatgttgcccaggctggtgtggaactcctgggctaaaataaccctcccacctcggcctccgaaagtgctttgattacaggggtaagccagagtgcctagtagtcaccctactttgatgtatcagaacaatattagcaaagaccagagaactttatagttatagaaagaccttagacctttagaactgtagacccttgaaccttagtacttagtattcatagaggtctggaaccttagaagtgtttaatcatcagcattaaaactggcaaagaccctgaggagcctcagagatatggaacgtcataatcataagcctttaaaacatgacaccctagcacctttgacccttgggaccttaacatcttagaaacacggagcgctagaatcataaaatatagatgatcataatcatgaattcttaaaacccaaaggtcagaatcagttccctccaaatcttagaactttagtaactcagcagtttataatcacaagatggatctctgatactaagatttttggaactttatttatttatttatttatttgaggtggagtctcactctgttgcccaggctggagtgcagtggcgcaatgtcagctcactgcaacctccacctcccaggttcatgagattctcccgcctcgggagtcccgagtagctgggactacaggcccgcaccaccatgcctggctaatttttgtatttttaattgaggcggggtttcaccatgatggccaggctggtcttgaactcctgggctcgggcaatctgcccaccttggcctcccaaaatgctaggattacaggcatgagccatggcgctggctcaagaaacctggctgatctagaaacctgtagtcccagcactttgagaggccgaggcgggcggatcgcttgagcccaggagttcgagaccagcctggccaacatggtgaaaccccgtctctactaaaaatataaacattagccaggtgtggtggcgcatgcctgtagttccagctagtcaacaggctgaggtgggagaatctcctgagcccgggaagcagaggttgcagtgagccgagattgtgccactgcactccagcctgggcaacaggttgagaccctgtctcaaaacaataagaaacctggttaggcgcggtagctcacgcctataatcccagcgctttgggaggccaaggtggggggatcactggaggttgggtgtttgagaccagcctggccagcacggcaaaaccctgtctctattaaaaatacaaaaattagctgggtgtggtggcgcgtgcctctaatcccagctactcaggaggatgaggcaggagaatcgcctgaacctcagaggcggaggttgcagtgagcctagatcgtgccattgtactccagcctgggcgtcaatagcaaaactctgtctcaaaaaaaaaaaaaaaaaagagagagagagagaaatctgtatatgccacaaagtatgaaccagattcaactggtggattgccagctttgtctgatctagaaacctagactgatgaaaacatacactcatggaaacttacagtcatacttttagagccttagaaccttaaaaaggtaggaacatatcaacttagaattctagaatttactaatttagtgtaagtgagtttgtttttagttttgtttgtttgtttttgtttttgagaaggagtcttgctctgtcgcccaggctggagggcagtgacactatctcggctcactgcaagctccgcctcctgggttcatgccattctcctgcctcagcctcccgagtagctaggactacaggcgcctgccaccatgccccgctaattttttgtatttttagcagagatggggtttcactgtgttagccaggatggttttgatctcctgaccgcgtgatctgcccgccttggcctcccaaagtgctggaattacaggcatgagccaccgcgcccgtcctgtttttagtttttgtttgttttttgaggaggagggggtctctccatgttgcctagacaggtctcaaactcccggtgtcaactcatccttctgagtagctgggattacagatgtgtaccaccactcccagctgtagaatttattattattattattattattatcattatcattattattatttggactgctgccaggctggagtgtggtgataaaaatcatagctcactacaacctccaactcctgggcttgagcaatcctcccaccgtagcctcccaagtagctgagactacaggcatgcaccatcatgcccagctaattttcttattattttatttttttatagagacagggtctcgcaatattttccaggctgaacttgaactcctggactcaagtgatcctcccaccttggcctcccaaagtgttgggattacaggtgtgaaccactggaatttattttatctagaaaatattaattcagtgcctgctgtgtgcctggctcatgctggacaacatgaggggcatagtggtgactgaggcagcctgggtcctgcccccacaggactcataggtcagtgagagagagagatccggttagacaatgatgacccagaggggtcagagacagggtaggggaggcacaggcagagaggttggggctgttgacagaaaggcacaagcatcaggctgtgatggggaagcccaaggactgtgggagcccataggatgtacttgatccagcctggagaatcaaggagggcttcttggagaaggagaggcctaacttcaggcctaaaggatgaattggcatgaacactggagtgaagagtggaagagtattctaggtagagggaactgcatatgcaaggcctccagaagctgggagtggcttgactgagaaggatacaggtgaggagtaaatgatgatgggagaggagccagtggaagccagatcctttttttttgagacggagtttcgctcttgttgtccaggctggagtgcaatgccgcagtctcggctcactgcaacctccgcctcctgggttcaagcgattctcctgcctcagcctcctgagtagctgggattacaggcgcctgtcaccttgcctggctaatttttgtatttttagtagagatgggggtttcaccatgttggccaggctggtctcgaactcctgacatcaggtgacccacctgcctcagcttcccaaagtgctgggattacaagcataagccactgagcctggcagaagccagctcttaaagggccttgcggggtaccagggagctatggaaagattttaagcagaggtgggaagattttaagcagaggtgggatatggtaagatgagaattaaggactctccaaatcttagaaccatgcttctgagagcatcttgcccagggaaatgtagaaatcccctttaagataaaaaaaaaaaatcctctccagtttgggcaacaaagcaagatcctgtatgcacaaaactttaaaaattaactggccacagtggcatgtgcctatattactctggaggctgaggcaggaggatcgcttgagcccaggaattgaaggcagtgatctatgatggcaccactgcattccaaccttccagcttgggcaacagagtgagatcccaccttaagaaattttattttattttattttttttgagacagagtctcgctctgtcacccaggctggagtgcaatggcacgatcttggcttactacaacctctgcctcctgggttcaagctgttctccttcctctgcctcccgagtagttggtattacaggcgcccgtcaccacgcccagctaatattttgtatttttagtagagatggggtttcaccatgttggccaggctggtcttcaactcctgacctcaagtggtccacctgcctcagcctctcaaagtgctgggattacaggcgtgagccacgcccggcctgtatgactttcataaatgctcacaaatgcacaactctgcttaaatctcccatgcttagggttcacatatagctctacaagtaaaacacatttatagaggaactccagaccccaaaccagtaacattcagcttaatagtaacttcatgatgctgctctcctgctgaaaccaccttgccactcaaagtgcaaatatgacgtagaccactacgctgcatttcttttgcatccctttgcccagctctctcatggtttttctcccgcttttattttgaggcagagtctcactctgtcacccaggctggagtgcagtggtgctatcacggctcactgcagcctcgacctcccaggttgcctgtaatcctagcactgaggctgagatgggagcatcacttgagcccaggagtttgagaccgacctggacaacatagtgagaccctgtctctatcaatgttttcaacattaaggaaaattgtttggaccccacgttcagtgtgttctcctactcaccctccacagtttgtggctcactactgtcattgatctgtgtgacgcctctctccaattctcttttattcccaaatctcaaatcaatttcttctcccctgtaggcaaccactgacattgttttgttttgttttttaaataaagatggggtcttgctatgttgcctaggctggtcttgaactcctgggcccaagcaattctcccacctcgacctcccaaagtgttgggaagccactgcttctgaccccattcagatagtttttaatgtgaatctttttctttgcatgagaataattttgcaaaatgtgcattgctaatgagtaagcatatatatatatatatatatatatatatttaactttttattattaaagtagttcatgacacagaatggcagataaatcatgccaatatttccacaaatgagtactctcttgtaaccagcacccatattaaaaaacagaatatacaatggggtgtggtgactcatgcctgtaatccgagtgcgttgggaaactgaggcatgatgatcacttgaggccaggagttcaagaccagtctgggcaacatagagagaccccgtctctacaaaaaaaaaaaattaaaaattagctgggtggggccaggcgtggtggctcacgcctgtaatcccagcactttgggaggcagaggcggatggatcacgaggtcaggagattgagaccatcctggctaacacagtgaaaccctgtctttactaaaaatacagaaaattagctgggcgtggtggtgggcacttgtagtcccagctgcacgtgaggctgaggcaggagaatggtgtgaacctgggaggcggagcttgcaatgagcggagatcaagccactgcactccagccggggttaacagagagagactccgtctcaaaaaaaaaaaaaaaaaaattagctgggtgtggtggcatgagcctgtagtcctagctactcaaaagactgaggtgggaagattgcttgagcccgagttccaggctgcagtgacctaagaaggtgccactgccctccaacctgggcaacagaatgagataccatctctaaaaaacaaacaaacagaatgtgacatatgacagctccagaaaagcatcctcatgccacctccctatcactacagtccaagggtgtactctcttaacttctaacagctcagcttcattttgctggtgttttaactttctgtaaatggaataatgcattgtgtgttgttttatgtccggcattattcactcaacattatgcttgtgggagattcatccatgtctccctgtgcttgtggggtggtccttctccttgctgtatagtgttgcgtggtgtgaatgtaccacagtgtgtttgtgcattcacctgttgataagcatttgggttgctgctagtttggggctactataaatggtggtgttgggccaggtgtggtggctcatgcctgtaatcccagcactttgggaggccaaggcaggcggattacttgagtccaggagttcaagaccagcctgggcaatacagtgagaccccatttctactaaaaatacaaaaaagtttgctgggtgtggtggtgcatgcctgtaatcccagctactcaggacgctgaggcaggagaatcacttgaacccaggaggtggaggttgcggtgagccaagatagtgccactggactctagcctgggtaacagagtgagactctgtcttaaataaataaatacataaaataaatggtggtgttctcaagtttctagtacacatatttggtggacatatgcgcttgtttctggtggtttacacccacgcaggagtgaagctgtccaatcatagagtaagggtatatattttattttacatatatatgtatctgttgttgttaattgagacaaggtcccgctatgttgctcaggctggtctccaactcctaggctcaagcagtcctcctgccttggctgcccaaagtgtttggattacatgtgtgagccatgcgcccggccaagtgagtgcatatctaactttagtagagactgcccgtttgtatcgttttatattcccactagcagtgtaccagagattcagttactgtgcaccccacccttgcgatggtcaggttttttgttttgttttgttttgtttgagacagagtcccactctgtcgcccaggctggagtgcagtggcgcgatctctgctcactgcaacccccgcctcctgagttcaagcaattctcctgtgtcagcctctcaagtagctgggattacaggcgcacaccaccacgctcagctaatttttgtatgtttagtagagacggggtttcgccatgttggccaggctggtctcgaactcctgacctcaggtgatctgcctgcctcagcctcccaaagtgctgggattacaggcgtgagccaccatgcccagctgatggtcagtctttttaattttagccattttggtggctgtgcattctgttgtggttttactttgcattttcctgatgactaagaacaacgaagaaggtgaagcacattttcatacatttattggccattcaaatatcctttagtgagatggccattcaagtcttttttttttttcttttgagatggaatcttgctctgttgcccaggctggagtgcaatggcacgatctcagctcactgcaacctccgcctcccaagttcaagcaattctcctgcctcagccttctgagcagctgggaatacaggtgcccgccaccacacctggctaattcttatatttttagtagagatggggtttcaccatgttggccaggctggtctcgaactcctgacctcaggtgatcgacccacctctgcctcccaaagtgctctgattacaggcgtgagccaccatgcctggcctgatttttaattttttatacaatggggtctggctatgttgccaaggctggtgtggaactcctggcctcaagcaatcctcctgcctcggcctcccaaagtgctgggataatgggcatgagccaccatgcctggcctgatttttctattcctgattacagtcttgttagcatggagcaagagttgagaactgaaatgcccaccaagaccagacgggctgcatacactgagagaactgggacctcctgtaagagggcagcggccacatagctcccgcgatggcagcctggcaggaatggaggtccagggttgccgtatcatgtgatatttcatgagaagcccaaaatctaaattttttaaagacaaagtcttcctattttaaaatgttggcaactgatttacatttttataaaacgcagtcggggtgcaaccaaatatatctcagaggctgggcgcagtggctcatgcctgtaatcccagcactttgggaggctgaggcgggcggatcacctgaggttgggagttcgagaccaacctgaccaacatggagaaaccctgtctctacaaaatatacaaaattagccgggcctcgtggcgcatgcctgtaatcccagctactcgggaggctgaggcaggagaattgcttgaacctggggggtggaggttgcaatgagccaagattacaccactgcactccagcctgggagacagagggagactccatttcaaaaaaataataataaataataaaataaataaataaaatatatatgtatacacacacacacatagacacacacacccctacctctctcaagtatgagttcccaaaatcgatgatcccccagaatccactgaagaaagccaaatctagtccaaatccctctttttgcgaatgtgaaaactggggtcccgagaggggagatgacctcgagaagtcacctggccagttattagtacagacagggcagaacccagttgtcctcattctggtaccactctagggatgcactaaaattccactttggctttagtactagccaaaacctgctatttggcatgggcatcatctgttagaaggcagaggaataaatcctcaatttaaaataattaaaagagtataattggattgtctgcaacacaaaagtatctatcccttaaatatatataactgctatgtacccactaaaattaaaaatacaattttttaaaaaaaatattgcttcttactctagcagtagaaaatatacatttacttatctgtattttttaactttaaattgcaccttgaatgtttacctctagtttgaaaacaaatatgcaaatattaacagtaaatgcaaaggaaatatcttgtttgtgtcagtgtgggttttgtgctgtttagataagatgggaccctatgtgaatactgatcatcaatcatacctgagaaagtgatggcagaaaagatgctaaattgaggatttattcctctgccttctaacagatgatgcccatgccaaatagcaggttttggctagtactaaagccaaagtggaattttagtgcatccctagagtggtaccagaatgaggacaactgggttctgccctgtctgtactaataactggccaggtgacttctcgaggtcatctcccctctcgggaccccggttttcacatttgcaaaaagagggatttggactagatttggctttcttcagtggattctgggggatcatcgcaaagctcttcgcaaagctgaggtggaacgatggcttgagcctgggaggcagaggttgcagtgagccatgatcttacatcaccgcactccagcctggattttatacagggcagaccctgtatcaaaaaaaaagagagaaaaacaagtacaattaaattattattgaatataatcaccctgttgtactgatatcaaatactagatcttactcattctttccatattttgtacccattaaccatcaccccttcccttaaccccactattgataatgttacaaaaggtaaattttatgaaaaaggaaattattgagagatttcaaatggttgaaggagaaataaactggaaatatacatctttattcctgaattaatggaaaacttaataggaaacttaatattatttagtaatgggattttaacagtaactgtacaggctaagctgccaacaaatcgacttcacagtacagtggcttaatggagaagctatttctccctcccagataacctcgagatgatcaacacagttggcaggaagacttagctcagagaggtcagtgtacattccaggttaatttcatcttgtattctgtagacattgaccttggttttccagtttatgggagtcaggggaagaaagaggaaggccaggcagcaattttctttttcttttttaaactttatttttggccaggcgaggtggctcacgcctgtaatcctagcactttgggaggccaaggggggtggatcacgaggtcaggagatggagaccatcctggctaacatggtgaaaccccatctctactaaaaaaaaattaaaaaaaattagccgggcgtggtggcaggtacctgtagtcccagctactgaggaggctgaggcagaagaatggcgtgaacccgggaggcaaagcttgcagtgagctgagatcgcgccactgcactccagcctgggcgatagagtgagactccgtctcaaaaaaaaaacaaaacaaaaaccaaaaaacaaaaaacaaaaaaaccactttattggcacccaccaccatgcccgctaatttttgtttttctggtagaggtggggtttcaccatgttggccaggctggtcccaaactcctgtcgtcaggtgatccacctgcctcagcctcccaaagtgctgggattacaggcgtgagccaccgtgcctggcctaaactttattatttatttattttggaggcagagtctcgctttgtagcccaagctggagtgcagtggcacgatctcggctcactgcaacctccacctccctggttcaagcgattgtcatccctcagcctcctgagtagctgagattacagatgtgcgccactaagtcctgctagttttttgtatttttagaagagacagtgttcgagaggctggtctcgaactcctgagctcaggcaatccacctaccttggcctcccaaagtgccagaattacaggtgtgagccaccatgcccagcctttttaaaactttagattatgaaataattacacattcataggaagtcgcaaagatagtagagatgataaaaagacatgtaactggctggttgtggtagctcgagcctgtaatctcagcactttgggaagcgtacgtgggaggattgcttgagcacagaaggttgagaccagcctgggcaacatcgtgagacccttgtctctacaaaaataaaaattaaaaaatcagatgggcatggtggcatgtgcctgtaaccccagatactcaggaggtgggaggactgcataagcctgagaggttgaggctgcagtgagccatgattgtggcactgcactcaagcctaggcggcagagtgagattgtgactcaaaaaaaaaagagtaatcctactaaaaaatgtccaagggattttaatgacgtttctccaaagatatacaactgtctgatggagcatgaaaagatgctcaacatcattagccattagggaagtgcaaaagaaaaccacagtgaggtacaacttcacgcccactaggatggccataaaaaaaaaaaaaaacagtagagggaaatgaccaagcgcagtggctaacacctgtaatcccagcactttgggaggcctatgtgggtggattccttgagcccaggagtttgagaccagcctgggcaacatagtgagacccctgtctccacaccaaatacaaaaattagccaggcctggtggcatgctcctttggtcccagctacttgggaggctgcgatgggaggatcacctgaggctgggaggcagaggttgcaatgagccaagattgcaccattgcattccagcctgggcaacgtagtgagacccccgtctcaagggaaaaaaaaggaggggttgggaaacagcaagtgttggcaaggatttggagtcctcacacattgctggtgcagcaacttttttttttttttttgagacagggtctggctctgtcacccttgctggagtgcagtggcatgagcacaggtcactgcagcctcaacctcccaaggccaagcgatcctcctgcctcagccactcaaggagatgggactacaggggcattccaccctgcctggctaattttttgtatttttttgtagagacagagtcttcaccatgttccccaggcaggtctcaaactcctgtactccagcaatccacccgccttggcttcccaaagtgctgggattacaggcatgagccaccatgcctggcctatggtgcagctactttggaaaacagtttgacagttccttaaggccgggcgcaatggctcatgcctgtaatcccagcactttgggaggctgaggccatggctgtatttatccgtgtcctctctgaactgagctctgtgagggccctgctgtattcacagagccttgaacaggcacagagtgtgcattcgaatatttattgaatgaatgaatgactagagccaactggggtcacaagcagggaaggcttcctgtgcaagtgacatgtcaggaaaacttcaagggacaggaaggttttcaccaggtgggtggcagagggtcggggaaggcgtcacaggtaggaggagacatgactgctgaggctggactctcttttttttttttgagaaggagtcttgccttgttgcccaggctgcagtgcagtggcgtgatctcggctcactgcaacctccgctccctggttcaagcaattctcctgcctcagtctcccgagtagctgggattaacaggcatgcaccaccatgcccggttaagtttctttttgtatttttagtagagacaggatttcaccatattggccaggctggtcttgaactcctgactttgtgatctgcccgtctcagccttccaaagtgctgggattataggcatgagccaccgcgcccagccgactcactctttttttttttttttgagatggagtcttgctctgtcgcccaggccggagtgcagtgatgcgatcttggctcactgcaggctccacctcccaggttcaagcaattctcctgcctcagcctctccagtagctgggattatgggcgcccgccaccatgtccggctgctttttgtatttttagtagagacggggtttcaccatgttggccaggctggtctcgaactcctacctcaggtgatccgcctgtgaggctggactcttgcagagagctgggtctgagcaggcttggctcgcggagggctggggtgaaggtggaagcgcctgggggctcatcagggcctctcctccagatgagcgggaagccgtgcagaagaaaaccttcaccaagtgggtgaactcgcacctcgcccgcgtgggctgccacatcggggacctctatgtggacctccgggacggcttcgtgctcacgcggctcctggaagtgctgtctggggagcagctggtgagggggcctgaagggctggggcaggggtcctccctggggtctcaggctgggggttgggcttctctggaagggctgaactgcaagcaggggcctggctcatgggcgagtggaacgtgctggaagggccctgtgggtaagaggtccctctactcgggtgtgtggggctgtggcgctggggcggagcttggtcgtgagaagcctgggcgcgtggctggaaccgaagctgatggctcgctagctacggttgcgaggcggggcttcggtggaaggggccgggctctgttgcaaggggcagggctattagagaagggaggagctttgttagaagggactggcccgggttatgagctagtaggggcatgctataaaacaggggcagaactgtattgcgggttgggggtgggtagtggatgaaggtgcggggctctaggctagggggcagtgttcgttggtagggtgacacctaggtcgtcggtgtctagggacgcagacggtgtcctgggatgtggcttgttgtataaattggggctgtgtctctgggcttgaatggggtttcatctaaaagcgtgggattctcatggggtagagattcgttaaaggactggagcctggatctcaaggaattgtgaggggcatggctatggaataggaacaaacagctgggcgctgtggctcatgcctgtaatctcagcactttggggagccaaggtgggaggaacacttgagctcaggagtttcagaacagcccgggcaacataatgagacccccgtctctacggtttgtttgtttgtttgtttatttgtttaaattaaccaggcgtggtggcgcaggcctgtagtcccaagtacccaggaggttgaggagagaggatcgcttgagcctgggaggtcgaggctgcagtgagccatgattgcaccactgctctgcagcctgggcgacaaagcgagactctgtttctctctcttttttcttaatttttttattcttttaaatagatacgaggcgtcactatgttgcccaggctgatctagaactcctggactcaagcgatcctccagcctcggcctcccaaagtgctgggattacaggcgtgagccactgcaccgggcagagaccctgtctcaaaaataaataaataacccaagcgctgtggtgagacccgtttctacaaaaaatttttaaaaaatcaaaaagcattagctgggtgtggtggcgggcacctgtagtcccagctgctcaggaggctgaggcaggagaatcgcttgaacccaggaggcagaggctgcagtgagtcaagatcgcgcgactgcactccagcctgggcgacagagtgagactccgtttcaaaaacaacaacaaaagccaaaaaaaaaaaaaaagaaagaaaaaaaagaatagataggaaccaacgctgttggaaggaattgagccataaacaaggggaagagcactggggcagggcggagcttgattgggatgggcgtggttctagctagggacccgaaagggaagcagcgaggggtgtgacgcggagtttttgtttgtttgtttgaaacgaagtctcgctccctcacccaggctggagtgcagtggcgcgatctcggctcaacagcagcctccgcttcccgggttcaaaggattctcctgcctcatcctcccgagtacctaggattgcgggagcgcgctaccaagcccggctaatttttgtatttttagttagaggcagtgtttcgccatgttggtcaggctggtctcgaactcctcgcctcaagtgaaccacccgcctcggcctcccaaagtgctgggattacaggattgagccactacgccggggcggccatgggattagtggcaaaacattggtagagagggatccaatggcagggccagggctgagactatgggctaggagggcggggcttcatgatgggggcgtggttatcaggttcgaagtggggcgcccgtggaaggggcagagccagggacgtgaataaaccttgaagggatgtgattctttaaagggtctggctatgggaagagacagagcttctttagaaggattgagtcctgtgtcttggataaaacgagaggaggacagcctgatcctggacactcagggggcgtggccacgggaggcgggcttctttggaagctgcggggccgagggcgccatactcctgtctgtccagacccccgatcgcccaccgcccctgtcgccctagcccaggcccacgcgcggccgcatgcggatccactcactggagaacgtggacaaggcgctgcagtttctgaaggagcagcgcgtgcacctggagaacgtgggttcgcatgacatcgtggatgggaatcaccggctgacgctggggctggtctggaccatcatcctgcgcttccaggtgaccctcgagtggcccctgccaagccccgcaacatgggacttaggaaagcgttccccaccatttacccattcattctttccttccaataatatcctaatatgctggaatcctattccaggtgttagggatgaaaataatgataaaaataattgtcacgatcaccaccatcacgataatcattttgtatcgaccctgttccaaacactgttctaagcacttgacatttaatacacacagcaaccccataaattaggtactatttagtaccccattttaccagtgaggaaatggaagcccagataggtggtgtcatctgcccaagatcacatatacctgggtgttggagctgaaattcgaatccaggcaatcttgatccagtatagagacaaatagacaaaggtgtgccttttaggagcttacattgtggtgaggaagacagataataaatacataaatatgtaaagaagacatgtatggaaaaaggaccagttctagttagagaagtttaaaaagctatgcagggccaggtgaagtggcctgtaaacccagcactttgcgaggctgagatgggaggaacactaaggccaggagtttgagaccagcctggccaacataatgagaccttaaataaatttaaaaaattagccaggcatggtggtgcatgcctgtggtcccagctactcaggaggctgaggcaggaggatcacttgagcccagcagtgtgaggctgccgtgagctatgatcatgccactgcactccagcctagacaacagtgagaccatgacttaaaagaaaaaaaaagctacccagaaaaatacagattatgataaaacaagtaatagggatataaaatgtcagttggtggtgttgagattttagatatggtggtcagaagagggctgtctgggaagttgatggctgaatgacatacaaagatgaagagagaatgcattccaggcagggggcacagcagatgcaaagtccctgagatagaaatgagcttggcctgttggaaatacaggaggaagagcagagtggctagagaatgggaggcaacgggagacatggaggagctgaggctcaggggatggaaggggctaggtgatctgtgatgagtagtttggattttattctgtctgagatggggagaggttgcaacattttatcaaggggaggtgcatacaagtttagaaagatagatccctttggctgggcatggcggctcatgcccataatcccagcactttgggaggctgaggcaagaggattacctgagtttaggagttcgagcccagcttggccaacatggtgaaaccccgtctctactaaaaatacagaaattaactgggcttcatggtgcacgcctgtaatcccagcgactcaggaggctgaggcaggagaatgtgagccgagaccacaccactgcactccagcctgggtaatagatagagactctgtctcaaaaaaaaaaaaaaaaaaaaaaaaagtgaccgggcttggtggctcatgcctgtaatcccagcactctgagaggctgaggtgggtggatcacctgaggtcaggagttcgagacaagcctgacaaacatggagaaaccctatctctactaaaaataccaaattagctgggcctggtggcacatgcctgtaatcccagctactagggaggccaaggcaggagaatcgcttgaacctgggaggtggaggttgcggtgagctgagatcacaccattgcactccagcctgggcaacaagagtgaaactccatctaaaaaaaacaaaaacaaaacaaaaaaaaaaacaaagaaagatccctctgggttggaggtgttcaccaacattgggagctgagagcccagggaggaggatagagttggaccagggtgggactatggggaagcaacaaggggcaggtggggaagacactcagggagtggagtggacaggccttacgggaggggagagggagagggtgtccaggggaagactcagagctctggcctggggactagaggatgatggggctgccctgagacagggacagggagaaggagcaggtttgaggaacaccctgaggccagtttgagatgggtccagtggttatgggtccaggacattggagttggggatgttccaggtagatggaacagccagtgctaaaggaccaaggagggaggatgcttgtgattcaggaaaaaggccagcaggtatggagtggagtgagctgttgaagatgaggtcatcaacttactgatgggagatcatgggaacttttacttttaccttgaatgaaacagagatacggagggtgttgaaaagaggagcaaggatctgatttgagtgttcgcagggtccctctctctgccatgtggagaacacactgtggatgcaggagtggggagatcagcatgaaggccaccgcactagcctaggcaggagacggcagtgccttagaccaggaaagtggcccagatgctcagtttggaggctttcttggaaacagagaccgaagtcctaactgatcccctaattgtggatgtcctggccctcaggaattatcctcacactcctggacccccacccccagccagaagctgcctcccccatctcctctgtcacctgccaccttctctggtagcagatggtgagtggggggcattcgaagcctcaagctctccaggccctggtagccattttttgtatcttcacagattcaagtcatcaaaattgagactgaggacaacagagagacacgctcagccaaggatgctctgctcttgtggtgtcagatgaagacagctgggtaagcacccccaccaccttccttaggaggttaggcaagtggtcccctaacctctgcaattccttcccagacaagagctcaaggggcagcccatgtcctcagggtcaaaaagttacatctgaaactaaccagctggtaaataaaatatgtccacttctccagccttgactaataatccttcctaacatgctagaaggccaggttcaaatttattttgaacttgctctgtcacccaggctggagtgcagtggcatgcactgaatagctcactgaagccttgatctcctaggttccagtgatcctccctcctcagcctcccaagtagctgggactactgcaccccacccagtttcaaatgtagaactcttggcctcactaggcacagtgtctcatgcctgtcactttgggagaatgaggctaggactttgagatcagcctaggcaacatagcaagaccccatctctacaaaaagttgtggggttttttttgttgttgttgtcgttgttgtttttaatcacaggcatggtggcagacgtctgtagtcgtagcttctcaggttcccaggaggctgagatgggaggatcatttgagtccaggagttcaaggtgcagtgagctacgatcatgccactgcactccagcctgggctacagagcaagaccctgtcttgaaaataaataacaaacacataaataaataaacaaacaaataaataaaaataaaatagaactcttggactcctcagagaccaatgctggaaagaggtgaactgtccccagcctgctctcttctctctctcccccatcccatttcatcctacatttcaagagatctcacattcacctgtgtggaccctcagtgctatgtccaagctctggccaccctctcccgctgtgagcatctcccttctgcctcacagggcatacacaggaaagttcaaagtccttggtcgcttcagtgtggctgagctggtggcggggtggggtgcaggctctactgggaaggttccctttggcccccaactctctgccctgcagggagcagtaagacctgaaactcaattgtcctctgtagagcagctcctgggaggacggagggaggggcaggtgtgggatggaggtgggcttctctgactctcatccttctggctgtctgtcttgcaaaggagatcatggggacttttgccatctgtttctccatgtgtctatctctatatctgcttttccttgtacttatctcttctctcctccctccttccctcctttcctccttcccttttctcttcatgtcttctttctctctcctctcctttccctccccatctctgtctatatcttgctctctccctgtcttgatacctctctccttcctctctctctccttccctctcttctctcttctttcttttgcttctctttttctcttctctcctgctatctatcttctatcaatctatatatctatcatctatcaacctatatctattatgtatgtatgtatctatctatctatcttctatcaatctatatatatatcatctatcaacctatatctattatctgtctatcatctatcaatctatctatcacctatttatcatctatctatgtatctacctatctctctctctactcaccatctatcacctgtctatcatctatctgtgtatctacctatctctctctctacctacccaacacccacccatccatccatctttctatgttctaccccctctctctcatcttccttccctatcattcggtctccctctgtctttttcccctttcttccctcctaactctccccatctctgcctctgtttctcccttcacccttccagttaccctgaggtaaacatccagaatttcaccaccagctggcgggatggcttggccttcaatgccctcattcaccggcacaggtaccacctggcctgggacagcccagtcctgcccttcagccccccatatccctgcagctgcacacctgtacatgtacttgtgtagatggcacacacagacataaagacccatcccttcacctctacacacacatacagttttctttcccttcacacacatgccctgcacatttacacacaggaacacacacccacacaggctcctgtccaggccacataccctgtgcacacatggacacacatgagccctcgcacagatgcatacacacacacagatacccacgcacgtgcacagcctgcccgcagggtaggaagctcgctcccctgtcactgtcatgctgctgtgtacccagcacctcctcctatcagaaaatgctttctcaggccaggcgcagtggctcacacttgtaatccctgcactttgggaggccaaggtgggaggatcacctgatgttaggagttcaagaccagcctggccaacatggcaaaaccccatctctactaaaaataaaaataaaaaattagccaggtgtggtggtgcgcccctgtagtcccagctactggggaggctgaggcaggagaatcgcttgaacccaggaggcggaggttgcaatgagccgagattgtgccactgcactccagcctgggcaacagagtgagactccacccctaacccccccaccaccaccaaaaaaaagaaaagaaaagaaaacacttcctcaaagtgagcccttagagtccccgtccctgtacacccacggattcataccttggggcctgacattgaaatagctgagggtcagacacccacacaaattagacacacatcatgatcattcgcatgacatattggggaaactgagactcaggcgcaggaaggggcttgtggtggtgtagctgaagccagaacccagctttttctgctgtggacacctgtccactcacaatccctgcttctcacacctacacacactcgtacacacatggggagacccagacccacctccatacacagaaactcacaagctgcaccagggtcatcctcacactaggtgacattcgctcagtgttttctatgcacaggcactgttctaagggcttcccactaaaacattcaatagtcaatgtatccattcagtgtgtccgatccacctatgggcaggtgctatttttatttatttatttattttgagggtgagtctcactctgtcccccaggctagagtgcagtggcacgatctcggctcactgcaacctctgcttcccagattcaagtgattctcctgcctcagcgtcctgagtagctaggattacaggcgcccgccaccacacctggataattgttgtatttttagtagagatgaggtttcaccatgttggccaggctggtcttgaactcctgacctcaggtgatccacccacctcggcctcccaagtagctgggattacaggcatgtgccaccacgcccggctaattttgtttgtttagtggagatggggtttcaccatttgggccaggctggtttcaaactcctgacctcaagtgatctgcccaactcagcttcccaaagtgctgggattacagggatgagccaccatgcccggctggcaggtgctattattatccccattttagaggaaaccaaagcacagagaaacgcagtagctcacctagagtgacacaaccaggatatgaccaagctggggctcaagctctgatgaactggctctggtcctcacacttctaaccactgcataacactacataagaatccccaaagtaagcatatgtgtgtcagaggtacatgtgtcctggccagacgcagtggctcacacctgtaatccctgcactttgggaggcctaggcaggcagatcacttgaggtcaggagttcgagaccagcctggccaacatggtgaaaccccgtctctactaaaaatataaaaattagcagggcctggtggtgcacacctgcaatcccagctacttgggaggctgaggcaggagaattgcttgaacctcggaggcggaggttgcagtgagctgggatcgcgcccctgcactccagcctgggtgacagagcgagactccatctcaaaaaaaaaaaaaaaaaaaaaaagaggtacatgtgtcctcacacaacacacataagggctgtacacactcgtattgtcatatgatttcacagagacatacacaggcaggcaccgtgtgggctcatctcttccaagcacactcaggctggcctacccattcgtctgtgtgcacaggccggcccagcaacaaatgcacatgcacacacacattcccgggaacgcacagagacatgcccgcgtccatcacactcacatcacagctaaatgctgcacagcacacacagcttgccccttggctagactgtgcccttctgcccattgccctgggcagtgctcagacaagggtggcttcttccctgcttgcccgccggctctggagcctgcctgctgcctgcctgctctgtgcccctgcccaggcctgatctcgtggacttcagcaaactcaccaagtccaatgccaactacaacctgcagagagccttccgcacagctgagcagcacctggggctggcgcggctgctggatcctgaaggtgagcctctcgcgggcccagcccagacttcgtcttgggggactcccaaccccaatgccatgtcacactcaactccatcccaccccagcaccatcccaaatcctgaggcctctccaaatcccaactctttccaaatcccaactgtctcctcagcctcctccccttgtgcctccccttcctcatgtgcgatccctcccacataccatcctcacacctcttcctctctcatccccaaccgtgtcccaacgtaacccctcctcttccccattctcaatttccacccatccccaacaccctccccaaccctgctttcaaccatctcccactaaaccaactcccactcccctaccccagccccaaacccagtggcatctccaacgccatccccacccctaacgccaaccccatcttcaagtgtctccatccccaccacatcttcggctccaactccattcctatccccaccctaatccatttccaaactcatttcgccctagcccatccccatgtctatctctcccacaactccatcctcatcctcagctgcttttccatttccagtctatccctaatcccatccctgacttcagcctcagccccaaaccaggatcagccctgacacccatctcccatcccaaattaaagctgctcccttcctctgagctctactgtgtgccagacacatgtctgggaaccttatcagagctgttcactttcatcttcacactgacctggttagagagaatttatcaaccctgttttattttattttatttatttatttatttatttatttatttatttatttatttatttttttagatggagtctcactctgtcgcccaggctggagtgcagtggcatgatctcggctcactgcaagctccacctcctgggttcacaccattctcctgcctcagcctcccaagtagcttggactacaggcgcccgccaccacgcccggctaattttttgtatttttagtagagacggggtttcaccgtgttagccaggatggtctcgatctcctgaccttatggtccacctccttggcctcccaaagtgctgggattacaggcatgagccaccatgcccggcctatttatttaatttttgagacggggtctggctctgttgcccaggctggagtgcagtgccatgatctcggctcacagcaacctccacctcacaggctcaagtgattctcccatctcagcctcccaagtagctgggactacaggtgtgcaccatcacacctggctaatttttgtatttttagtagaggtggggtttcatcatgttgcccaggctggtctcaaactcctgacctcaggtgatctgcccactttagcctcctaaagtgctggaattataggtgtgagccaccgtgcctggacgttttatttatttattgttcttatgttcatttatttatttatttgagacagagcctcgctctgtcactcagactggagtgcagtgggggcgatcctagctcactgcaacctccgcctcccgggttcaagtgattctcctgcctcagcttcccaagtaactgggactacaggtgcacgccaccaagcctggctaatttttttttttttttgtatttttagcagagacagggtttcaccattgttggccaggctagtctcaaactcctgacttcaagtgatctgcttgcctcgtcctcccaaagagctgggattacaggcgtgagccatcacacctggcttacttatttatttttttatccaactgaatttaatatttaaaccctgtttaattattattattatgtttgaaatggggtctcactgtgttgcccaggctggagtgcagtggcacaatcttggctcactacagcttcaacctcctgtgctcaagcaatcctctcacctcagcccccagagtagctggggctataggcgtgcacgaccatgctcagctaatttttgatttttttttttttggtagaggtggggtctcgctatgttgcccaggctggtctcaaactactggactcaagcgatcctcccaccttggcctcccagagtgcctgggattacaggcccgagccacatgcctggcttaacctgtcttccaaagtgatgagaatgacagctcagggatgttgtcacttgcccagcatcacactgaaaatcaggaaaccagaccttatggctccagaattcatggtcttaatcagtcctctaccctgcctcttatagctgtatcctgtgctcagtgcctggtacgtagtaggtgctaatggatgtcagttggacaaggcagtgaagaataaaggccaggtatactgttgtgcatccagtgggtaaattaaaatgatatcactcagtcatggtgatggcttgtgcctgtaatcccagcactttgggaggttaaggcaggaggatcgcttgaggccagaagttcaggaccagcctgggcaatgtagtgaaatcccatatctacaaacctgtagtcccagctacacaggaggccaaggcaggaggatcacttgagcccaggagttcgaggctgcagtgagctctgattacaacactgcaccccagatcccaactcaaaaagcaaaaaacaacaaccaattaaagtgatgttagaatttgttgagtttcccctctgtgccaggctagtctttctaatacttacattgttcccaggaggcaggaaccatgataatctttattataacaatggggaaactgaggcttagagaagctaggttattttctaaggacatgcagtgagtaagtgttgaactgggatccaagtgcatgctgcctccaaagcctatgttcttgacatcaagccttgtgcacaatttgcaagctaactaaattttaatttagcacctactgtgtgctgggtaagacagaacagtgataaagaagataggcatacggctgggcccacgcctatagtggcccacgcctatagtcccagcactatgggaagctgaggcaggagtattgtttcagcccaagagttcaagactagcctgggcaacacagagagaccctgtctatgttttataaaaaataaaaagtctatttaaaaaattacaaaaaattagccgggcgtggtggtgtgtgcctgtaatctcagctacttgggaggctgaggcatgagaattgcttgaacctgggaggcagaggttgtggtgggccaagatcacgccattgcactccagcctgggcaatagcttgagactgtctcaaaaaaaaagaaagaaaaagaaaagaaaggaaaggaaaggaaaggaaaagaaaggaaacaggcatagtgtttgtcctcatgaagctcaagctctagataatgacataatcacataagtgaatatgtaattacaaattgtgatacattctgggaaggacatcataagatgctaagaggagaataacatgaggattatcaactatagacagagtgaacatggaggcttgtctaaggaaatttgagttgagccaggcatggtggttcacacctttagttctgactactcaggaggctgaggtgggaggattgcttgaacctaggagctcgaggctgcagtgagctatgattgcaccactgcacaatcagcctggacaagagagccagactccatctcttgaaaaaaaaaaaagtaaaaagttgagctctgaagaataagtgggaattaggaacacagaagaggaacagtgctccagacagtgagaacagcacatgcaaaggccctgaggtggaaggtagaaaggtgtgttcaagaaacaaatataggccaggtgcggtggctcacatctgtaatcccagcactttgggaggccgaggtgggcggatcacctgaggtcagcagttcgagaccagcctgaccaacatggtgaagccctgtctctactgaaaatataaaattagccaggcatggtggtgcatgcccataaccccagctacttgggaggctgagacagaagaatcacttgaacctgggaggtagaggttgcagtgagttgagatcgtgccattgcactccagcctgggcaacaagagcaaaattccatcttaaaaaaaaaaagaaaagaaaaagaaaagtatagcttatttctctgcggtggtttatatgtgtcaggcactatttaattccaggaggtagatttctatttgacggatacaaaacctgaggaacagagaggttaattatcttgcccaaggtcacacagctagtgagagtggcttctccatccctccatccaataccttcaagcactctgtcaaagtgcccactgtcttgtttccccactccctcttgcttccagatgtgaacatggaggctccagatgagaagtccatcatcacctacgtggtctctttctaccactatttctccaagatgaaggctctggctgtggaggggaagcgtatcgggaaggtataaggagccaaggagtgggtgagtgggaagctggaagctggtggcaggcacgggtgggatgaggctgaccccccttcctctgctgtgtcaggtcttggaccaggtattggaggtggggaagatcatagaacgctacgaggagctggcggctgagctgctggcctggatccaccgcaccgtgggcctcatcagcaatcagaaatttgccaactccttaagtggggtgcagcagcaactccaggctttcacggcctattgcacgctggagaagcctgtcaagtgaggcccagctctggagggagggtgggcaggggtggcatgacggcagggctcctgagctcatgccccttcaggttccaggagaaggggaacctagaggtgctgctcttcagcatccagagcaaactgcgtgcctgcaaccgtcgcctctttgtgcctcgggagggctgtggcatctgggatattgacaaggtgaggccggggatgcaggggagaggcggggttgcactgtggagttgtataggttgcacactgctcaagggaatcattcacattgtagacatgatggattagatattcattctgacagtttttcagtagtaaagtgtcataaggaagcaatattttttccaatttgcatgaagttgccataatgctatgagtgacctcagactaagtcaagaccattaaactgtggggagctgtcagagtctgagtgcctcctcccatctcctgcaggcatggggtgagctggagaaggctgagcatgagcgggaggctgccctacgggctgagctgattcggcaggagaagctggaactactggcacagaggtttgaccacaaggtggctatgagggagagctggctgaatgagaaccagcgtctggtctcccaggtacaaggtgtagggcttggctccagggtaaagggacggagggcggggctgatggtcctgggaccagagagggagacttgatcttctaggcaacagggaagagttagattagtctcctggtgataaatgaggatggggatgggagacttggccttccaagtgattgttgggtgaggggaatgggcctgatctccagggtaatgggagagtgaggctggtctccagggtaactagagagggcagaattcatcttttcaggaatgggggagtgttttaagtgacaagggaggttgtatcttgtgtctagggtaactcagaaggatagaattggtttcctaagtaacagagtcaggtaaacctggtccctaatctccaggacaggggaagcatgggcctccttcctgggtaacaagtttaaggttagagatgtaacaggagggtgggacttgtttccagggtaactggagagagtggggctggtctctggggaaacgggaaggtggggttggtctctagggcaacaggggagggtgggtctggtctccagggtaactggggaagattgggctggtctccaggacaacaggggagggtggagctggtctccaggataactgtggaagatgggctggtctccagggcaacaggggatggggggttggtctttagggtaactggggagggtggggctggtctccaaggtaacaatggagggtggggctggtctccaggttacctgggtaacaggggaggatgaggctggtctccaggataactagggagggcagggccagtctccaaggtaatggagtggggagtccccagggtcacacagggtcaaggtaacaggtggactgctgaggcagcatgggtgagtgtctggctcactgccccaggacaactttgggtatgagctgcccgcagtggaggcagccatgaagaaacacgaagcgatcgaggcagacattgcggcctacgaggagcgggtgcagggtgtggcggagctggcccaggcattggcagccgaaggctactacgatatccggcgggtggcagcccagcgtgacagcgtcctgcgccagtgggccctgctaactgggcttgtgggtgcccggcggacacgacttgagcagaaccttgccctgcagaaggtcttccaggagatggtgtacatggtggactggatggaggagatgcaggtgccggcgggggggcggggatgcgggtggagtgccaggagggaggggaggatgcagacgctgaaagagttgtcagacagctggagatggagagggaagggcagagatagaagaagatagagagaaagccagggagacaaaaagagagaacaagagagagagggagagaaagatacagagatggacaagagaggcagacaaagaaacacagaatgagaaagagacagagacaaatagagagaaatagaaacatgctggacacggtggctcacacctgtaataccagcactttgggaggccaaggagggcagatcacttgaggtcagcagtttcagaccagcctggccaacatggtgaaaccccatctctactaaaaatacaaaacaattagccgggcgtagtggcgggcgcctgtagtcccagctacttgggaggctgaggcaggagaatggcgtgaacccgggaggcggagcttgcagggagccgagatcccgccactgcactccagcctgggcgacagagcgagactccgtctcaaaaaaaaaaacaaaaaaaacaaaaaacaattagctgggcgtggtggcgtgtgcctgtagtcctagctatttgggaggctgaggctcaagaattgcttgaatccaggaggcagaggctgcagtaagccaaggtggtgccactgcactccatccagcctgagtgacagagtttgattctgtttcaaaaaaaaagagagaaatgaaaaaagacatagagatatagaaacagagtaaaccagggatgcagacagagagatagtgacagtttgagagagaggaaatcagagagacagagagaggagaaggcagacacaaaggtgacatggaaatctacatgactacagagaaagatacaggaagatggaatcaatttaagagagagagagagagacctaccagatctagagagagatgagacaagaaagatagaagccagctgggcatggtggctctcacctgcggtaccagcactttgggaggccgaggtaggcagattgcttgagccccagagtttgagaccagcctgatcaacatagtgagatcctgtctgtacaaaaaaaaaaaaaaaaaaaattagctaggcgtggtggtgtgcgcttgtagtcccagctactctgaagtgggaggatcgcttgagcccaggaggttgaggctgtgtgagccatgattgcaccactacacttcaacctggatgacagagtgagaccctgtctcaaaaaaaaaaaaaaaaaaaaaagaagaagccgggcacggtggctcacacctgtaatcccagcactttgggaggctgaggcaggcagatcatctgaggtcaggagttcaagaccagcctggccaacatggcgaaaccccatctctactaaaaaatacaaaaattagccgggcgaagtacatctaatcgggaggcaggagaatcacttgaacctgggaggtggagtttgcagtgagctgagatcgcgccactgcactccagcctgggtgacagaggcagactctgtctcaaaaaaagaagaagaaaaaagaatgaaagggaggaaggaaggaaggaaggaaggaaggaaggaaggaaggaaggaaggaaggaagaaagaaaggtgaacaggagacacagacaggaaggtgaacaggagatggagagaaagagaaaagggtagaaatgtagaaagagaggcagagaaagatggagacaaagatgtatagataagaaagacatggaggcagagagtgagccactgtgacagagacagagcccagaaatgtggagtccacgagagatggaaacattcagagagagactggtagagagagagggagacagagacagaacaccatggctagctgtgagagctgacagcagctggggctcagcttttttctttctgatgaggaaaccgaggtccaggccacagagctggtaagagagtcttgaggctggtccatatctctccaagagggtcagagtcgggagtgatggtgcagagtagcaggggctggcataggcaatgggggagaggtgagtggcccagggcagtgccagaggtgtgctcagtgctgtccccgcttgtaggctcagctgctgtcccgggagtgtgggcagcacctggtggaggcagacgacctgttgcagaagcatggactgctggagggagacattgccgcccagagcgagcgggtggaggctctcaatgccgctgccctgcgcttctcccagctgcagggtgagtcttggggctggggctggggctatgggtggagactgtcaggactggtgctaatagaggcaagagtgactcctgagagaaggaaagagtgagctccttgtccttggaggcatttaagcagagcctaagattacattccactggggaagtcatagggagaatcagtgccctgagtggcaggatgggccactcgacctcttcctgctttagattctgcagtaataacccacatttattgagcacttgttatgtgccaagcccttcacagattgatctcaacgaataccatttaaaaagacttgtgtgggctgggcacggtggctcatgcctataattccagcccttttggaggccgaggcaggaggatcacttgagcccaggaattcaagaccagcctggccaacatagaaagacatcatctgtaccaaaataaataaataaataaattagccaggcacggtgatacaagcctgtagtgccagctatttggaggctgaggcaggaggctcacttgaggccaggaattggaggcttcagtgagccatgatcatgccactacactccagcctgggtgacacagtgagatcttgtctcttaaaaaaccaaaaagaaaacttgtgctaagtaatgttaatcagggcctatttaacacaagtgatagaaactcagttcaaatggcttaaggtgaaaaggagtggattggctaatgtaaccaaaatgttcagggaagcctagtcaacatggcgaaaccccgtctctaccaaaaatacaaaaaattaggtaggcatggtggtgcacgcctgtagtcccagccactgcagaggctgaggtgggagaatcacctgagcctgggaagtcgaggctgcagtaagccaagattgtgccactaaactccagcctgggcaactggactgagaccctgtcagcaaaaaaataaaataaaaaaaaaaaaagtctggggaagggtgggttttacctcaggcatggctggatccaggtatggctcaagggtgcttttaggactccatctgagaccaggcatggtgtctcatgcctgtaattccagagctttgggaggcaaagatgtgaggattgcttgaggccaggagttttgggcaacatagtgagaccccatctctatatcaaaaaagaaaaaaaaaagaaaaagactcaggccaggcacggtggctcatgcttgtaatcctaacactttggaaggccgaggcaggcggatcacttgaggtcaggctttggccaacatggtgaaactccgtctcttctaaaaatacaaaaaaattagccggacatagtggtgcacacctgtaatcctagttactcaggaggctgaggtgggaggattgcttgaacccaggaggcagaggttgccatgagccgagatcgcaccactgcacactccagcctaggtgacagagcgagactccttctcaaaacaaaaacaaaagactccatctctctcgtctctctccatcactagtctttgtgttagtgtcactgttgagcagtcctgtcccttgtggtataaatctgggatcattcagccccaggtatacagcctaacaggttagcagagccaatgggacccaggcccctttctcccaagagttctgacaaaaagtcctaggagagcttgcattggctcacagtgggttccatcattgctcagccaatcattgtggccccagggcatgcagtgatctaatcggccacatgcatgtgacctgcctaccccagggccaggagtggggtcagcccattacaaaggcttagactgaaaaagaggagagagggacggccttaccagatatggatgggacatggatgctgataggcaaaaccaagactggctctaataaggttcctgtcttacttatgtcaatgccctccagccagagaccaccaggagtccctctgtggtcaaacgaagttgggtttggtggctctttacacccaccatggggagctgtggggcttctcagcaagaaagtatgatggggggctaggcgcggtggctcacgcctgtaatcccagcactttgagaggccaaggtaggtggatcacatgaggtcaggagttcgagaccagcctggccaacatggtgaaaccccatccctactaaaaatacaaaaaattaatttggtgtggtggcatgagcctgtaatcccagcaacccagaaggctgaggcaggagaatcgcttgaatctgggaggcggaggttgcagtgagcctagatcgtgccactgcacaccagcctgggcaacagagcgagacctcatctcaaagaaatatatatatatatatgactggtggcttattgtaggatttgggcttgtgttaggtgatttggaagatgattcagtgtagtgagttttgctgtggattggatgctgtcagaatatgggggtgactaggtgattgggggtcttaatcattttgatctaggtggtgggaggaagagaaggaggctgttgcattcattggcagctgtcattcatctgagccggcgaggggatgcgtggtcatttttgtggtttgcacagtgaccttgattttgtctgtgctcaggcaagattatggagcgagcttggttttgtcctactccatcgtggtcagagtggccccatctgatatgagcgttctgtgagttttttttattattattgttgttgtttattgctttttttttttttttttttagacacttgatctctctatgttacccaggctggtcttgaactcctgggctcaagcaatcctcccgcttccacctcccagagtgttgggattacagacgtgagccattgtccctggccatttctgtgagattattatttttacttatttatttatttttgagatggagttttgctcttgttgtccaggccagattgcaatggcgcgatctcggctcactgcaacctctgcctcctgggttcaagcgattcttctgcctcagcctcccgagtagctgggattataggcatgcgccaccatgtccggctaattttgtatttttagtagagactgggtttctccatgttggtcaggctggtctcaaactcttgacctcaggtgatctgcccgctttgtcttcccaaagtgctgggattacaggtgtgaggcactgcgcttggcctgtgagattatttatactcctcagaacacgatggctagccctgagtgctgacggcagttggggctgctttatttctttctcactgatgaggaaactgaggcccaggccatggagctgataagagggtcttgaggctggtccgtatctctccattaagatgttctcctcctttatctggagcccacagccctttggaatcttggagcattattcgaaaaggaagaacctgtctggcttgcaggttgatggggaagtttctcaccctagccgacctgggtcacatcctaaatgcaaatgctgaagtttccctccacgccctggtgtggacatcctgaccctggctcagctccctcccatccccatctcacctccaggggaggttgttgggaccctctccttcaccttagctaggtttgtctcaggaagctccctttgccctcgccttgtgaattctcggctcctgtgacaatcagcagctccgagaatacagcagaggggccagtgtggggagtgcgagtgtggggagtgcgttgtcatggggatgggaggcagcgcttcctgatgggtggtccagagtgtgagctcctgatgggccacttcttagctgatcctagggcaatccttcccctctctgaggctcagtctcttaatctggaaaatggggctgataaggacactggcctcataggatggttgtgagaatcaaatgacattgtgtcagagtaagggctgggtacatggaagctgttttttttttgttgttgttgttttgttttctaagacagagtctcactctgttgcccaggctggagtacggtggcactatctcggctcactgcagcatcaacatccctggctcaagtgatcttcccacttcagcctcccgagtagctgagactacaggtgcacgccaccatgcccagctaatttttgtatttttggtagagatggggttttgccgtgttacccaggctggtctcaaactgctgacctcaagtgatctgcctgcttcggcctcccaaagttaggattacaggtgtaagccactgcgcctagcaagaagctgttgttattgtaactattattcagttggataccttgtggtttgagtcaacatcagcgaatgtccagaattacagaaatcccgcattccacatagggcagtgtctcacttttatgatccagtaagaaatacacagccaggcagtggctcacgcctgtaatcccagtactttgggaggccaaggtgggtgaatttcttcagcccagatattggagaccagccagcgagactctatttctacaagaaacttagaaaaaaaattagccaggcatggtgttgtgggcccatagtcccagctactcaggaagctgaggcgggaggattacttgagcccaggagttggaggctgcagtgagccatgatcatgccactgcactccagcctgggtgatagagtgataccctatctctaaaataaataaataaataaataaacacacttacctcatgactcacagttcacatgcatacatgggcacacaggctaacacagaggttttataaaacaatacttccaggctgggcgcggtggctcaggcctgtaatcccagcattttaggaggctgaggggggcggatcatgaggtcaggagttcgagaccagtctggccaacatagcgaaaccccatctctactaaaaatacaaaaaaaaattagctggacatggtggcacgcgcctgtaatcccaactactctggaggctgaggcaggagaatcacatcaacctgggaggtggaggctgcagtgagctgagatcaagccattgcactccagcccaggcgacagtgagagactctgtctcaatcaaacaaacaaacaataccaaacaacaacagcaacaacaacaaaaatactcccccgaccttgttttgcattgtgatattttccgttccttctattctattccaccaaacaaatgctggctgtgacccattaaattaacttcactgttttctagtcgccaactagccatccaggaggaaggtgaactatttaaggaaaaagagggagttcggggttaagcacagtggctcatgcctataatcccaacacttcgggaggccaagtggaaggattgcttgaggccagccgttcaagaccagcctggccaacatagtgagatcctgtctctattttaaaaagaaaaaggagtgcagataaccactgggattgatagataatgcaacagaggatgacagagggaacctagaaacatggtttaagaaaagagaagttggccggtggcagtggctcatgcctgtaatcccagcagtttaggaggccaaggcgggtggatcactggaggtcaggagtttgagaccagcctggccagcatggtgaaaccccgtctctactaaaaatacaaaaatgagccaggcgtggtggcgggcgcctgtaatcctagctactggggaggctgaggcaggagaatcgcttaaacctggaggtggaggttgcagtgaaccgagatcgcgctactgcactccagcctgggcaacagagtaagaatctgtctcaaacacacaaacaaacaaaaaacaaagaagtttcatttgactcagttctgacataagcacaattttcactcaaatatacagaatctgagatgctctgaatccatccatcattcagtcaacaaatcactacattcactaggctacagctctgggctccaccctttgctgggcagtgtttgggatagggtgtgacagacccaggtcctgcccttaaggagctctcagtccagtgggggagacaggacaaggcaatgacaacacagagtagtcagggctaggatggggaagcagagaagcctgagagggtcgaggaggagcctgctccagccttggggtgtcagggaaggctgcctggaggaggagccacgtgacccggcatctgatgaagtcacaccaaggacagggtaggtagcccgcaccatcctctcttgggcgccccttggcttgtgaccaatcctggatgctccccttctcctggctcaggctaccagccctgcgacccgcaggtcatctgcaaccgcgtgaaccacgtgcacggctgcctggcggagctgcaggagcaggcagcgcggcgacgcgcggagctggaggcttcgcggagcctgtgggcgctgctgcaggagctggaggaggccgagagctgggcgcgcgacaaggagcgtctcctggaggctgcgggcggcggcggtgcggcgggcgcagcgggcgcagcgggaacagcgggcggcgcgcatgacctgtccagcacagcgcgcctcctggcccagcacaagatcctgcagggcgagctgggcgggcggcgagcgttgctgcagcaggccctgcggtgtggcgaggagctggttgcggccggcggtgccgtcggcccgggagcagacaccgtgcacctggtaggcctggcggagcgcgcggcgagcgcccggcgccgctggcagaggctggaagaggcggcggcgcggcgagagcggcggctgcaggaggcgcgggcgctgcaccagttcggcgctgacctcgacgggctgctggactggcttcgcgacgcttaccgcctggcagccgccggtgacttcggccacgacgaagcttccagccgccgcctggcgcgccagcaccgcgcgctcaccggggaggtggaggcacatcgcgggcccgtgagcggcctgcggcgccagctggcgacactcgggggtgccagtggcgcagggccactggtggtggcgctgcaggtgcgcgtggtggaagcagagcagttgttcgctgaggtgaccgaagtggcggcgctgaggcgccagtggctgcgggacgcgctcgctgtctaccgcatgtttggcgaggtgcacgcgtgtgagctgtggatcggcgagaaggagcaatggctgctctccatgcgtgtgccggattcactcgacgacgtcgaggtggtgcagcaccggtgagcgcgcacatgtgggactccggggtccccttcctcatgcacccagtctcaccttcattggctcaacagttcccatgtttgctcagctggaactaggagttccaatccctgcttcacccatagccagctttgtgacagttctgcaacctgcctaatcttcctgaacctcagcttgcccacctgtataatgggggtgatattagtccctacccaggcttgtgatgaacggtaaatgagttcatacatgcagaatacgaagcaaatgcctgggggtagaggaagcattcccccagcatttgctcttgttacccaggcttacattcgccaagcatgaaatcaacgacctatgcttctacagggacacctcagcctggcccctctgctgggaggcctcccattgcttctgcataaatgtcacctccctagctactaaaatagctctgactcttgtgattttccattgtttcatcctgttttacatttctttgtagcacttaccatcccatgacatattgtatactgacttgtctgttggctgacttagcaatgagttgttcaattagtgggtgaacaatgcctattccccctctgcaccactctgtctgagcatcttattcatccatacattcattcagcaggtgtttactgagtgcctatgcctttctaggtcttgtgctgggcactgctggaaacacagggctgctccttgcccctactgtgcctgcagttgcccagttctttgaaacattgatttaaagatgggaggaccatgtctagcttaaagtagacctcagtggctgccatgtggagggcaggttggagcgggtaagagttgtggctgggaacccagagaggcaactgggctggggacccagatggagcggaacaagattagaccagggcgggaggtaagtaaacaggccatggagactgatgggctggagcgattttccaaaacaaagcccagggctctggcctggcagatgacagtgctgtccccaacatgggggcccagaggaagaacaaatttgagtcaggtgggtgtgaatagccccaagaaggtatacagtaggctttgaggtcgaagacaggttcaaaaggtaagaggttgaggctggagactgaggtgtgactgtcatgagttcaggggcaaagaccaaggctgtggggctgggtggaatcattgaagaagggtgtgaaggaaaacccagagggctcagggtggagttgctgctgaggaatctcacatttaaacatcaggtagaggctgggcgtggtggctcacgcctgtaatcccagtactttgggaggccaaggcaggtggatcatataagatcaggagttggagaccagcctggctaacatggtgaaatcccgtttctactaaaaatagaaaagttagctgggcgtggtggcgcatgcttgtaatcccagctacatgggaggctgagacatgagaatcgcttgaatccgggaggcagaggttgcagtgagccacaatcgcgccactgcactccagcctgggtgacagagcgagactctgtctcaatacatacatacataaattaattaaattaaattaaataagttaaattaaattaaataaaataagcagcaagtagaagagaaggagcccacaaaggaggctgaaaagaagggtggattgagaattaggagtagaaccagtagaaggtatttcataaaaccaaggtccgcagggttcgggtgtctgagcatctccatcctcctgcagattcgagagcctggaccaagagatgaacagcctgatgggccgcgttctggacgtgaaccacacagtccaggagctggtggaaggaggccaccccagttcagatgaggtgcgttcctgccaggaccacctcaacagcaggtaggagggcctggggctgggagtccctcccatccttcccttccacactcacacagccatggacagcaagatgtgcaatctcaaacccctggaatcataatggccacccgataaatcaacaaaatgttgaccaaaaatcataatccctgatactggtgatgacgtggtaaaattaaaacaacatttcagttggctgttcatttatttgtccagaaagaatgtattggatatctacaatctgccaggagtattcccaagcactttatatacctttctaaagtatcccaacattcttccgggcacagtggctcatactgtaatcccagcacttcaggaggctgagatgggtggatcacttgagctcatgaattcaagaccagcctgggcaacatggtgaaaccccgtctctctctctacgtgcgcgcacacacacacacacacacacacacacaaaatatatatatacacacacatatatatacacacatatatacgtatatatacacatatatacgtatatatacacatatatacgtatatatacacatatatacgtatatatacacacatatacgtatatatacacatatatatgtatatatatatacacactatatatatgtatatatatatacaaaatttagccaagcatggtggtgcacatttgtagtcccagctacatgggaggctgagttgggaggatgccttgagcccaggaggtagagattgcagtgagcagagattgtgccactgcactccagcctgggcaatagagccagaccttgtctcaaaaaaaaaaaaaaaaaaattcccaatatcccaatttccatagtaaagatcctagaattcagaactctctctctctctcttttgagacaggatcttgctctgttgcccaggttggaatacagtggcatgatcatggctcattgcagcctccaacacctaggctcaagcgatcctcccacctctgcctcctgaggaactgggactacaggtgcatatcaccatgcccagctaattaaaaaaaattttttttgtagagacagggtctcactgtgttggccatgctggtcttacaactcctgggctcggctgggcgtggtagctcacacctgtaatcccagcactttgggaggccaaggcaggtggatcacctgaggtcaggagttcgagaccagcctgaccaatatggtgaaaccccatctctactaaaaatacaaaaattatccgggcatggtggcatgtgcctgtagtcctagctactcaggaggctgaggcagaagaattgcttgaacccgggaggcagaggctacagtgagccaagatcacaccactgcactccagcctaggtgacagagcaagaatctataccaaaacagacaaacaaacaaacaaacaaacaaaaacctcctggcctcctcccaccttggccttccaaagagctgggattacagtgtaagctactgctcctagcccagaactctttaagataagtaacaaactaatatcagtacctctggaatactaccagcaattctcccagtgcaggtggggttcatagatgaagatacaagtccaaaaaggtgaactccttatccaagattactcagtctataagtaggagtcaaatacagttctggctgaatcctgagctgtagctgtttatctaatatatccagtcttcctggtaacactatgaggtggaaactaccccacattagagaggagaaaactggatctcagagaggcgaagatggaggcccaaggttacacagcaagttaggggatcaaaccgggctttgaagatggatatgtttgacttcaaagactgtgctctttttttttttttctttcttgagacagggtcttgctctttcgcccagactggagtgcagtggtacgatcatggctcactacagccttcaccgcccccgacccgagctcaagaaatcctcctgcctcagcctcttgagtagtgggactatggatgcacaccactgcacccggctaatttttgtattttttgtacagatggggtctcactctgttgcccagactggtctcgaactcctgggctcaagtgatcttctgccttggcctccgcaagtgctggaattacaggcatgagccactctgccccacccaaagactacgctcttgactctgtgctgcaagattccaatatccagggattttaaaacctctgtagccaagaccatcgcaaagcatccaggcctaaaaaaataactacaatcataacgatttacagcatgtagagagatctatatgccaagtgctttagccacatgatctcgttacacactcaatgaagtggactttattatccccattttccagatgaggaaactgaagatcagagaaggaaatgatttgcccaaggtcacatggcaaatctggccagagcagaacttgaactcgggtctgcctgatttcagagtcctaatctctgtcctcatggtgtgtccattctagagggggcagaaagacagttaaatacactaataaatggacaagatatttagagaatcataatggctttatgcaagaaacaggcagggcatggtggctcacgcctgtaatcctagcattttgggaggccgaggcaagcagatcacttgaggtcaggagtttgagaccagcctggccaatgtgatgaaaccccatctctattaaaaatataaaaactagccgggtgtggtggtgcacgcctgtaatcccagctacttgggaggctgaggcaggagaatcccatgaacctgggaggcggaggttgcagtgagctgagatcgtgccactgcactccagcctgggcaacagagcaagactctgtctaaaaaagaaaacaaaatttaaaaaacccaaactattgaggaccccaagagcttgttttagtgggtcatatctattgctatttactatattagaacttagtactgagaaaatttaaaatgtttttatttttatttatttattttgagacagggtctcattactctgtcacccaggctggagtgcagtggcacaatcatggctcactgcagcctcgacttcgcaggctccagcaatcctcccatctcagcctcccaagtagctgggaccataggtgtgcacccccacgcccagctaatttttgtattttaggagtctcaccatgttgcccaggctgctctccaactcctgagctcaagcgatccacctgcttccgtcttccaaagtgctgggattacaggtgtgaaccactgcacccggctgagaaatttgaaaacattatttaaaaataacaatacactgggagtggtgcgtgcctgttagacctgtgaggctgaggtgggaggaccgcttgagcctgcgaattggaggcttcagtgtgccataaacgagttcatgaatagccactgcgttctagcctgggcaacatagtgagatctcacgtcttaaaaaaatttttttaaatctaaatatctaacgtgttaatataacttttttattaaaaataacttttcataacacaaaatgtactaagagtggcattgtttcgtacctttgcaaatctctttaaagtctggtttaagagatggcagctgggcttctcttaaatcagagtcggcttctgctctcagtctctcctgccgcctctggaaaactccactgaacactcgggaaagaatgagagtgaaaaagcaaatggcgtcttaacacatttttatgaagatagttttgtcctctatcagattacatgttgagaatggctgccctaagcaaaagtgctgcgtagggttccattttacaccggcagaaactggagaaactttctgaggtcacacagtggctgggtggcttgggcctggattctaccctgggtcggcgggccctccgcgcccaagaggagtccctgtcctcctcaagtcactctctttcccctgggcaggtggaaccgcatcgtggagctagtggaacagcgcaaagaggaaatgagcgcggtgctgctggtggagaaccacgtgctggaggtggccgaggtgcgcgcccaggtgcgtgagaagcggagagctgtggagagcgcgccccgggccggcggcgccctgcagtggcgtcttagcggcctagaggccgctctgcaggcgctggagccgcgccaggcggcccttctggaggaggcagccctgctggctgagcgcttcccggcgcaggcggcgcggctgcaccagggcgcggaggagctgggcgccgagtggggcgcgctagctagcgcggctcaggcctgcggcgaggcggtggcggcagcagggcgcctgcagcgcttcctacatgacctcgacgctttcctggactggctcgtgcgcgcccaggaggcggcgggcggcagcgaggggcccctgcccaacagcctagaagaggcggacgcgctgctggcgcgccacgctgcgctcaaggaggaggtggaccagcgcgaggaagactatgctcgcatcgtggcggccagcgaggcgctgctggccgccgacggcgcagagctgggcccgggcctggcactagacgagtggctgccacacctcgaacttggctggcataaactgctcggcttgtgggaggcgcgcagggaggcgctggtccaggcgcacatctaccagctcttcctgcgggatctacgccaggcgctcgtggtgctgcgtaaccaggtgcccactcggggtgtacatttcggagagggagagtccgaggccgcggggggattgcagggacagggacatgcgggggtggggaggagggtgtttcctgggaccactgggttctgaggtgggtgggaggtgagagagtatccggaatggataactgagtttgtggaacatccagtgtgtgtggaagtgtgtatgtaacagaatttgaggagtatcatcagtggggtaggttggtgtcttatcggaggtgacagtttgtgggctatcccgagtaagtaatgcacgaggatatttattggagtggcttcctgggttcgtggattatctgaaaggaaataagactatgaggttgattggcgatggttaaatggggttcaaagaagatcttggtatggataacaaaggattaggattatggaggtaggtaacaggctgaggggttattggagtcagtcagtgattgtggattacatggtgtggatggctaaattagcacaatatcttcatttctgggaatgacaactatggattctctggagagagtaactgtgtctgtggcatgaggaaccaagtgcagtggttatctggggacagccaatccagttgggagatcactctgggatgggaaccaagtttgagaattttggcaagatggaacagccagttttcagattgtccagtgtttggggatcatgttagaaagggtgcctgcctgtactggttatataagggatgctgacccagtttgaggattatctacagcagtggtccccaatcttttttttttttctttagatagagtcttgctctgtagctaggctggagggcagtggcgtgatctcagctcactgaaacctcagcctcccgggttcaaacgattctcctgcctcagcctcccaagtagctgggactacaggcgcgagccaccatgaccagctaatttttgtatttttagtagagatggggtttcaccatgttggccaggatggttttgatctcttgacctcatgatccgcctgcctcggcctcccaaagtgttgggattacagacatgagccactgcaccaggcccagtccctaatctttttggcaccaaggactggttttctggaagacaattttttccacaaaccggtgggaaaaggaggaatgttttcaggatgattcaagcgaattacatttattgtgtgctttatttctattgttattacattataacatataatgaaataattataaaactcactataatgtagaatcagtgggagtcctgagcttgttttcctgcaactagacgttcccatctagtgacatctaggggtgatgggaggcagcgacagatcatcgggcattagattctcataaggagtgtgcaacctggatcccccacatgcgcagttcacaatagggtttgtgttcctatgagaatgtaaagctgctgctgatctgacaggaggcagagctcaggcagtaatgctcactcgccccccctccacctcctgctatgcggcccagtttttaacaggcgatggactagtacccctctgtggcccagggcttgggaaatcctgatctagggagtggaggagaaaggacagagagcccctgaatcataagattactaaatatggagctgaagtggccttgagagaccctttctgacccacccatttaaaaaatagagacaggatcttgctatgctgcccaggctggtctccagctcctgggctcaaacagtccccctgctttggcctcccaaagtgctgggattgcaggtgtgagccaccatgcccggccctgacccactcattttactagttagaaaactaaccccagagggaaaagaacttccttgagttcacacagtacccagtttagttgtcttctttttttgagacaggacctcactctgtcacccgggccagagtacagtggcacgatcatgactcactgcagccttgatctatggggctcaagcaatcctcccacgtcagccctccaagtagctgggactacaggcacgtgccaccatgcctggttaattttttgtatttttagtagagatgggatttcaccatgttgcccaggctggtcttgaactcctggggtcaagtgatcctcccgcctctgcctcccaaagtgctgggattataggcatgagccaccgtgcccagccttcagtcttcatagtaaccaattttttttttttttttttttgagatggggtcttgctctgtcacccaggctggagtgcagtggcgtgatcttggctcactgcacctcctccgccttctgggttcaagcgattctcctgcctcagcctcctgagtagctgggataacaggtgtgtgccactacacccggctaatatttgtatttgtagtagagatgaggttcaccatgttggccaggctggtctcgaactcctgacctcaggtgatccacccacctcggcctcccaaagtgctgggattacaggcatgagccaccatgtccggcctaatattaaccaaatatttactgagtgcctcctctgtgctgggcgctattttggggctgagcacacctcaggcaacaaaatacaaaatcctgccctcatgtggttgacattctagtatgtaggggaggagagagtaaacaagtcaatgcatcgctaatattgccaggtacatgctatgagaaataatacaggagggttggctgggtgtggtggctcacgcctgtaatcccagcacttcgggagtccaaggcaggtggattacctgcggtcaggagtttgagaccagcctggccaacatggtgaaaccccgtctctaccaaaaatacaaaaaaattagccgggcatggtggtatgcacctgtaatcccagatacttgggaggctgaggcgggagaatcacttgaacccaggaggtggaggttgcagtgagccgggattgcaccactgcatccagcctgggcaacagagtgagactccatctgctccctccctgccaaaaagaaataatacaggagggtagtgggatagggctggggtgggagttgataaatttggcaggttggtcagagacctgaagaaagtgaaggagccagccatgggggtatctggagggacagactcccaggcagaagcaccagcatgggcaacagccccgaggtgggaccacaactggaatgttctatgcttgcaaggttgcggggagtggtggcaagccaggctggcagcctctcccaggtcctggaatggaatgaggctgacctttgcaccacgctccctcctccccaggagatggcgctgtctggtgcggagctcccgggcacagtggaatcggtggaggaggccttgaaacagcaccgtgactttctcaccaccatggagctgagccagcaaaagatgcaggtggccgtgcaggctgcagagggcctgctgaggcagggcaacatctacggggagcaggctcaggaggctgtgacccggctgctggagaagtaggtcccctagacccatccaccccagggagggggcagaagatggggcccagcataggggagtggtgtgggaggccagggtcccactcctttcatcacgatttctgcttctctggggctctttcctatttctatttaattccatgttgtcttagatttgatttaagtggatttttttttttgagacggggtctcactgtgttgcccaggctggagtgcagtagcacgatctcggctcactgcaaccctcacctcccaggttcaagtgattctcctgcctcagcctcccgagtagctggggctacaggcatgagccaccacgctggctaatttttgtatttttagtagagacacggtttcaccatgttggccagactggtcttgaactcttgaccacccaccttggcctcccaaagtgctgtgattagcggcatgagccactgcacctggccttaagtggatatattgtgaaaaggtaacctgaggctgtcaacccaaaagatacagaaggatatacaatgaaaggtttctttcttaagtctgccctgagcatgggatagctggtcctgttgttaaaatgttaggctgggtgcagtgactcatgcctgtaatcccagcacttcggtaggctgagacgggaggattgcttgtgctgaagagttccagaccagcctgggcaacatagtgagaccccttctctaaaattaaaaaaaaaaaaaaagctgggcgtggtgatgcgtgcctgtagtcccagctactcttgaggctgagatgggaggactgtttgagtccgggagattgaggcagcaatgaactgtgatcatatcactgcagtccagcctggatgacacagcaacattctgtcccccctccaaaaaaaaaatgtgttaacttacttccctagatgcctcattatccatcctgctcttctgcaccctccttgggaacccccagacctccccagatccagcagctagaggccaggcacaggtgtgttccagctttccagatgggacagtgtcccctgccaggctggttgtcaaatattttgcataagcacctcttcctggccccagccactctaggaagcatgcaaagtgagtgtctgcatgtctctgtgtctctctcatctcttgaacctcattgttctctgcttctgtcgccatctgtctcttgccaccactctcttgtctgtccttgcactaatcaagcgaagatatttattgagcatctactgtgtgccaggcactattgtaggtaggcactgaacaaaacaacaccaccacctccagccatcatgggaagtcctttctcatcttccagacccagttctgtctgtcattagagctgtttctgctcctcctggtgaccctaaatttctcctctcaggctctctggctctctccggcatgatccaggccagaaggggacccagtacccctccttctgtcttcccatctcctgacagaaagcatccctggtcacttcactgtgccacccccagccccaggaccgctaccccttttctgtttacggctcagacatcctttccctagatttatctggggcaaggcagcatgcttctaaaggaaacttttatgggaattctgttcttgaggatgcaaactcatcatttagtgcccccttttccatccaggcctggatccttcctttgttccactttttttttttttttttttgagacagggatcttactctgttgcccaggctggagtgcagtggtgcaatcatagctcactgcagcctggaactcctgggctcaaccaactctcctgcctcagcctcctgagtagctggactataggtgtgagccactgagcatggcctgttccacatttcttgagcacctgctgcatgccaggctcagcaaaacgaggaggaggagcccgggggactgttcattccatgattcattcattcattacttttcagtcattcattaattgctcctttcactctattgtttattcactcatcctccagtcaattaaacatgtactgagcccgtgctctgtacggagtgggggtgtgttcacagaaatgaccaggacagaacatgattcctgcctcacagagctcgaacgttatctgacaaggatggcccagaatgctcggggctgggatggaggaagtccaggcagaaaggtcagggcccggatgggagacgtgcagccgctgtgggagaggcagcatttgtcccaggcttgtggtgggtgaggtgtggtcacagagggattgagacggactaatctctgcaccttcccaccatcccagtcatttatttgtctagggacacatttcccaccctgtgggaggagtgggaggagtgggaggagtttccacatccgccaagggggcagagccatacagagctggggactggggccctggggccctgggggtcttagacctggcttcacccctgaatccgtgacattcagggcaagtcacttagagcttcagcttgcctggcccctcacctggaacctgtgtgtgaggtgctgttctttttttttttttttttttttttgagatggagtctcactctgtcacccaggcaggagtgtagtggcgcgatctcgcctcactgcaacctctgcctccagggttcaagctattctcctgcttcagcctcctgagtactgggatcacaggaaagagccaccatgtccaactaatttttgtatttttggtagagacagggttttgccatgttggccaggctggtctcaaactcctgacttcaagtgatccacctgcctcggctccccaaagtgctgggattacaggcgtgagccaccgcgccggccgctaggtgctgttcttatctgcgttttgcatgtgaggctcagaggggaaaactgacttgcccagagtcatggccaggaagtgccacagcctagatttgaaccctgttgctttcttttcttttcttttttttaaagacagggtcttgctttgttgcccaggctggagtgcagtggtgcgatcactgctcactgcagcctcaatctcctgggctcaaacaatcctcctgcctcagccttctgagtagctgggactaaaagcatgtgccaccttgctcggctaatttttcattctttttttgtagagatgaagtctcactatattgcccagggtggtttcaaactcctgggctcaagcaatcctcctactttggcctccccaaagtgctcggattacaggcgtgagccatcgtgcccggcctactctgttgttctttcaccctcatggagactcagggtcttcctcatctctaggactgatgcttgacagtttggctgctgaaggcctggaaagattgatttcagctcaatttcagaggcattttatctttcctggctcctaagctaagttgggcaggaggcagtcagtgcttcgcttgcttgtctcaggcccttcctgttccttctctctggttctgtctctgcaactgtctcctatacactctgtctctttgcttccatctatccatctatttctgtatctctgtttcctgctccctctctgtttttctctccgtttttctctccctccatctgcacctctctaaccctgtcttttctgcctctgtctttcacagatactgtacttttgtttctcccatcttttttctctctgccactgtgtttcttgcattcattcatttaacaaatataagtcgagcgtgtactgtatgccaagccctttttctaagcattggggacacatctatgaacaaaacagacaaaaatccctgccctcatggaaatgatatatcctagcatgggagacagccaagataaataagtaacatatagcacgtgttagattgcgttaagtgctaaggagaaaattaaagaagggaagaaagccagaaagtgttggggagtggtcaggagggacctcacgaagaaggtgatctttgagtagatgttgggggaaggagcattcccagcagagggaacggctagtgccaagggcctgaggcttgctcaaggcacagcgagaagggcagtacagttaccacagagtgagggggaagagtgcaaggagaataagagtttggaaaggtgggggtgtggggcctggtaggtcagaaaggcctctgagattggccgagtgcaggagctcactcccatcccagcactttgggaggccaaggcgggtggatcacttgaggtcaggagttcgagaccagcctggccaacatggcgaaaactcgtctctactaaaaatacaaaaattagccaggcctggtggtgggcgcctgtaatcccagctagttgggaggctgaggccggagaatcgcttgaacctggggggtggaggttgtagtgagccgagatcacgccactgcactccagcctgggcgatggagcgagactccatctcaaaaaaaaaaaaaaaaaaaaaggactctaaggactctcatggagaccctgggaggatctctaaggactctcatggagaccctgggaggatagtctcattctctctctctccctgggggagacagatagcaacaggacagggatgcatgggagcccatgtgggatgccccagccccatccaccaggcctcttgggcactttgccttgcactgtgggcaggaggccagactgcccggggcccatggtcccagccggctccagagtggtacggcctgggtccagcctggtcagttcagtcaggccaagggcctcgctctgcctgcaggagtgcccacttcagcttctctgcgactctgctgtcatctctccccacactctgctctcttccctctctccaactctgcggccccctggtctgtctgtcgtctgtggggctgtcttttcctggtggcatttgccactcctctgcctgtctctctctgggctgtccctgaccggactcctcctgtcactttccctctctctgcctcctctctttcgtcgtctgctgctccctgagtttctttctggctctgccttgctccatctcttttctcgtctttttttattctctctctcgctctctttctggtgtctcctctcactttctcgtttgttttgttttgtttttgtccctaggtatgtctgtctttacttctctgttatctttctctctggacttgcctttttttctctccgtctatatctctttctttctaagtgcctgtctctgcctctccctttctcttcctctgtctgtctctctctctgcccttcttcagccccgtccctgcgtccctggctttgccccactaattcctccctctctcttacatattttccacgcccttcttcccctacccagcccagtgccctcacagtcctactgccagcgccgcaccccccaacccggggcctttccccagcccttatctccccatccccaggaaccaagaaaaccagttacgggcccagcaatggatgcaaaagctacatgaccaacttgagctgcagcacttcctccgagactgccacgaggtaggaactccaggtgtgctggggacggagacatcccctttagtcgggagggaagtgcttctcggccgaggtgggggtggggacgccccgtctaagtgggtcgcggagcgatgctcgctctaagccgccagggggcgcgcggagccgggtctcagtgcgcatgctccgcaagtccctgcccgcccacgccgactccgggaaacgaaggaggggccccgggcgcccctggcaaccgcgcgtgtccgcgcctacgggtcccgcggggacgcgcgctgatctcacctttctctcctgagatttgtgagaatcgctctaccccaggagaggggcggggcgggcggtggggataagggccgagggccgtgggggggccagcggccctgcgccctcctgcagccagcgatggctctgaaccaagccctcgcccctttaaaggtgttcagtaatcaagccccttcccttagggatgatctgcacacattagggacgatctcccctaatccgagatggtccaggcccccttccttattagtgacggttcaggagacctgctgtcttcccctccttcccttgcattccatagaaacgattctagactttggccacattagagatggcctagtaaacattttcctaaaccctaaacagagctaggcctggccctgagcccctccatctgtgtgacccaggatcatcccctcctccatcatcaccccgtacctaagtttcttccaaccaaagctggttcaggaaccaggtctaacccctaaacccctcagcctcaattaaagacgattcgaccctcccccctatgttgaacacccatgggagattgttctctccgcacacggaataaacaagggcctccataccgtgcccccctcccccataactggggtaggccgggacttgagccactggaggaaccccctgttccccctcgcccccactggagattgtgagatgttccaggtcgccctcccatatcccctgtccacatgtggtggccaggagcccgagcttcttcccattagagatggttcaggaggcccccacccagcccctcaccataatccccactcccttagtgaggcagtccaagccccaggcgctccctcccggcattagatttggtccaggagcaccccccatccctcatgagattgttctggatcaggcagcaatcatctgagatggcgcagaagccccccacccgaagccttggggcgagtggtggttcctcctgcacccccacctggggccccgcaaagaggcgggcagggaggcaggcagggggcgcacgcgggcgggcgcgcggccgccgcgcgggggcgagggagggggcgcgcggccgccggagcctcagccttcgccgccgctgccgctgccgtcgcagttgaggggcgagcacccgcccgcccgctgcagggacgccccgccaacgccactgccgcttcaggtctcgggggcgcccaggggagggggttggcgcgcaccccgcggacgcagacaggggagggggctcgggcgcgtgcccgcccgtcgtggccgcgggagggaggggcggggcggcgcgggggcgggccgggcaggcgcccggacccccaccctgggggaggggcaaggacgccgggagctgtccgcggtgctggcgcgggcgggactgaggggccggcccccaagggaggggagcgaagcggggggacttctaagaccacttctagggtaatctggatttgccctaagggttcagggcgtctcagcctttcgagggggggctcttctccgggtaatggggcatctaagatttgccctggggttgggggtttctcaaccttttggggggtttctttcttgttttgggaggatctgtatcagccttggatgatggaggtgaatcacttttggggggctctgccttggaagatgaggggccttggattttctctgggtctagggggctctgactttgtggggcttttcctgggttgttggatagtctggttttgccctccatcatgaaggaatcacttttgagggggctttactttgaggatggggtaccatctctttaagggctctgctttcactgcgggctgtggttgccgttggactcttccctgcacgtcgggaacctgtgaattgagttggggggttcagcactggacttggttctagtgtgtgtatgaaggagtgtgatgctgtcctggacccctggggagcacatgctcaggggacatgggctggggtttggccggctggggatctgggatttgtccttggctatgactgcatttgcctcccgggaccgcggagctggagtccagtgtttgtttttttttttttttttttttttttttttttttttgcaggagggaggagggaggatcttgtgactggagtggggaggagaaaggggaggagcaaactgtttcaggtgccaggtttggtcatgagtggggaagttctggcttggaggataagtctggttttttactggagggggttgggggaggctcaaaaagcagcctgtgattgatcctctctagtgccgtgagaggggcccactcttggtgcttgcgttttggatgactggttttgttggtgggtaggaggactagaactggctttagttgtaggggtgggggtgctggccgggcttgggaggtccgatctgatccacgatggagagtctgtggctagattttggggtagactggtttggagagccagaacacagctttgtttttcacatttggctggggttggctttggttgagggctagaactggtcatggtttggggatctatggtcttagagtcccagggctagaactggggagccctgtgggctcattaggggtgctagatctcgattatggaggatgggtctactccagattagagggttagtttagagagagctagagttggctttaattgggaggttgtttggggggtttatctggccatactggaggaactggggctagatatgggggcttcatttgatacccttgggaatgggttgaggctcttgaattggtccttattggggggtggctaagattgaatgaagtgtctaagtgttgctatgggaggggtggtcctggggatgaattgggagttagctaaattgggttggagagcttgttttggggggggtgatctgtccccaagtctaagaggctgactggccctgccttgggggcttgtggggagttgaggagggcttccctcaggacaggggacaggggagcaaaggattgggcattctggggacccttccatccatcctctatccaggaaagagcttgagctgcacccacccccaatataaaggcctcacttgcaaaggttttttcatcctttcctattccttccacccatacaccctagcagcccaggccctgaacctgggacttcctgaagggatggggggctgtggcaggttgaggggaccagctgagccctcctgccctgttctgcacagctggatggctggatccatgagaagatgctgatggcgcgggatggcacgcgggaggacaaccacaagctgcataagagatggctccggcaccaggcattcatggccgagctggctcagaataaggagtggctggagaagatcgagcgggtgaggaagctgatggcccctctgcctgtgccaggtgcaggaggcctccagggagcccacgtctcacctgctgcacccgctgctgccatcctgctggtcttacacctctggactgactcaaatcagctccagatctgctcctagctatgtggctttgagtgattcatgtaacatctttgagcctcaatttgctcatctgtaaagtggccagcatctcttctgaatggtgcctgtatcctactgtttgttaaatatttcacttcttaatataacctcctctaccaggttccttccataccatttggggcatttaagatggaaggttggggagatgggctgggacagaccctgggaagcccagggttaaagtaaactttggattcttagagccctgggttctaactgtgtctatgcctgttaccagctgtggggccttaggtaattgtgttaacctcttggagcctcagtttgctgttctataaaattaaggaaataataaatatagctacttcctgggctctgtgcacataaagtacttaacacaaggccacgcacctaagagctgtaattactgtggtcttgttacttttaatacttaatgttacctaagtagctctgggccactaagaaccttgacttcagtcttggagggactgaggtagatatttgctctaagcctcaaccctcagaacttccccctcctctggctgaacccctagacctgtagccctggatatacacacttttctgactcacacagagacacccatgttggccttaaacccttaaatggtcattgatgtttcataaatggtggcatatggcgaaggcagtcttcttgactttgagtttaatggaagttcattctctccctgcctctctggctccctctatctttctttcctgtctgtctatccctctatccttgtctttcttacggtcctctccccatgtttctgattttctgtgcctgtctctctgttgatcactctgtgactgtttgtctctccctgactccttcccatgtctctgtgtccatctgtctctccctgtatctttctgtctccctcccctcacttctgtctgtctgtctctctcttcttgtctctcttccttggttccttccatttctgggcctatctctgcatccacccctcatgtctctctctccctatgtgtctcccactccctgcctctgattctcttttcacatccttccctgtgtcctgtcactctcccacacttctctgattctccccaccatctatctatcttctccatctcctgccatccacccacttggggcaggagggccagcaactgatgcaggagaagcccgaactggcggcctccgtgcggaagaagctgggcgagatccgccagtgctgggcggagctggagagcaccacccaggccaaggcacggcagctctttgaggccagcaaagcagaccagctggtgcagagctttgctgagctggacaagaagctccttcacatggagagccagctgcaagacgtggaccctggaggagacctggccactgtcaacagtcagctcaagaagctgcaggtatggtcttcctggcccagatgagggctccctatgccacatgggggccaggtcagggtccaaccccactcaaggtatgtcaagtggaggggatttaatacagggatttatttcaaacttgtagaagatgagaaagggaatattgaagcaatccagctagtaataactgttggaagcagccaccactccctaaggtatggagtacaaagggaaaaggaaggatctagagccacaaagcagtaggtaaatgactagcatgctaaaggtttcacaggaccctgacactcatttcctggatggagaaaccaaggctcaggggtatgggaatggctttgcatggaataacaatgacattcattgagcatttctctaccagtctctgggccaagcactcactgaactcatcccagccacttctggagattggtactgttattatcctgttttaccaatggggaaactgaggcacagaaagtaaggcacctggcccaaggacacacagctaaccagtgtctcctttatgaaacagggcactcttagagaacagacgcagcgtctgctttgtatctgctcccagcttggcagctccatgcttggtacacagcagttcacgtggaatgaccagaggtgaacgtagccattgcttctcacctcccagggagtaatggctcctgcctttgattttctttttttgttgctgttgttgatgttgttgtttgtttttttcttcaagatagttactcactctgtcgcccaagctggagtacagtggcttgatctcagtccattgcagcctcaaactcttgggctcaagtgattctcccacttcagccttccaagtagctgagaccacaagcgcataccaccacgtctggataatctttttaaattttttatagagacagggtctcaccatattgcctagggtagtctcaaactcttgggctcaagcaaccctcccgcctcagccttccaaagtgcttggattacaggtgtgagccatggtatctggcccacgtgactcctgcttttacctgtcaggaacaatgcctgactgactgatgggaaactgaggttccaggaggtgagaggtgaacttacttgtccagagtagcaaatagcaaagcctggatttcagtccagtgcccttgactcttcactcctcctttttgatatatttcctatgtagttatatagtgcttggcatagtgtatggcaaaaaaaaaaaaaaaggctagtaagaaatacataatgacactgattagtatgtattcattcatctctgtggcaaataattattaggtaccagctgggtgtggtggctcacgcctgtaaccccagcacttcgggaggccgaggcgggcggatcacgaggtcaacagttcgagaccagcctgaccaatgtggtcaaacctcatctctactaaaaacacacacaaaaaaattagctgggcatggtggtgcacgcctgtaatcctagctactcaggaggctgtaatcccagctactcaggaggctgaggcaggagaatcacttgaacggggaggcagaggttgcagtgagctgagattgcatcattgcactccagcctgggagacagagcgagactccatctcaaaaaataaaaaaataaaaaaaataattaggtacctactatgtgcccggcacttttctgggtgttgggatatagcagtgggcaaaatggatgaaaagttactgccttcacggtgatcccattctggttgggggaacaagcaaaagaacaaaaagacaaacagatctgaatgtgatggccaatggggtcagttcgttctttttccctccgctcccctccccttcccctctcttttcttttcccctcccttccttccttccttccttgcttccttcgttggagtcttgctctgtcacccaggctggagtgtggtggtgcaatgtctgctcactgcaacctctacctcccaggttcaagcagttctcctgcctcagcctcctgagtagctgggattacaggcatgtgccaccacacccagctaatttttttatttttagtagagatggggtttcaccatgttggccaggctggtctcgaactcctgaccacaggtgattcacccgccttggcctcccaaagtactaggattacaggtgtgagccactgtgcccggccaatgaggtcactacttaatatagaatagcagttctcaaatgtctgggtctccaggaccccccttacactcttaaaccgcattgagatccttagaaagctttgtctgtgtgggttagacctattgacattcactgtattaaaaatgaaaatcgaggccaggcataatggctcatgcctgtatcccagcactttgggaggccgaggcaggaggattgcttgagcctaggagtttgagactagcctgggtaacggagcaacagcctgtctctattttattttatttagttatttgagccaggatctcgctctgttagcaggctggactgcagtggtgcaatcacggctcactgcagcctcaacctctggggctcaagtgatgctcctccctcagtcccgcaagtagctgggactacggacccacaccaccatgcctgattgattttttttttaagaaacagaatctcactatgttggccagtctttatctctatttattgaactaaaaaaaaaaactaaaacggagtctggctctgccacctaggctggagtgcagtggcttgatctcagctcactgcagcctctgcctcctgggttcaagcagttctcctgcctcagtctctggagtagctgggattacaggcctgtgccaccaagcctggctaatttttgtatttttagtagagatggggtttcagcatgttgcccaggctggtctcgaactcgtggcctcaggtgatcggcctgccttggcctcccaaagtgctgggattacaggcatgagccatggcatccagactgtagttctctttcatgtctagaatagaagagagctagcttctcccatccgtgtctgtattcaatccatttcactagcacaggtcatcaggtctctgaaaaacactgctgcatgctggagagagaatgagaatggtgaaggcaaataacatcttagtatttttataaaaatagttgtaaccttgcagatgccttgaaaagatctcagggatcccccaggggttccttggccacagtttgagaactgctgatgtacacaatgtgctgggcactgttaactcctctctcctccccaacagccccatgagggaggtcctgttattatccccacccagcagaaaaccacagcacagaaaggatctgtggctcacagaggtcacatggctaccaagtggctattcaataccacctttagtccctccctgagcctctgtcctccctcttaaataggactctatcatcagtgcaggtctcccagggccaggtggggatgtgcacagaaaggagccacttagcacagtgcccaggatgtggtaagcctgcaagaaaggggcatctgactgtcagggtcccagccagaaacagaagcaggctcacctgcagaaaacttgagtttcttgacaaaggtgtgagtggagaacggggaagctgcaggaagcatatagggctgtgggactcatggaggggagcttttgctcctccctagccagagaaggtagagaaggaaaagttattggaacttggaaggggagagttgccagacaggagctggcactcttagtcaagaacggcagccatggccagacgcagtggctcacgcctgtaatcccagcactttgggaggccaaggcgggtggttcacttgagatcaggaattcaagaccaacctgggcaacatggcaaaaccccgtctctactaaaaatacaaaaattagccgaacgtggtggcacatgcctgtaatcccagctactcgggaggctggggcatgagaatcgcttgaacttgagaggcggaggttgcagtgaggcaagattgcacctcactgcactccagcctgggtgacagagtgagactctgtctcaaaaaaaaaaaaaaagagaaagaaagaaagaacggcagccagaccatggcaccatagcagggaagagctggggagataataccccagactcactttcctctgggcttccctttgtcagccagggctggcttcatgggtgtttgcccgtgcagtgacacagggctccatgcttggtttaatgccctactattgatgtcttgaatttttttgtttttgaggcagtttctacctctgtcacccaggctgaagtgcaatggcgtgatcatggctcactgcagccttgaactcctggactcaagtgaacctgtcacctcagcctcctgagtagctgggactacaagcgtgtgccaccacgcccagataatttttgtagtattttatagagacgggggcctcactgtgttgcccaggctggtctcaaactcctggcctcaagtgatcctcctacgttagtctcccaaagtgctgggattacaggggtgaagcactgcccctggataaaattcttaataaatatttgaacaagggaccttgtgttttcattttgcactgaaaagtataagccatgtttgaggccaacccacatggaagccagaggacaggagggctggtccatgcaggtcagtcctgcacagggcagggtgaagaagcttggactatgggtctcaagatcccgggctgaagcatccatccacctcggcctcccaaagtgctgggatcacaggcgtgagccactgccccagcctattgctaggattcataattatcttgcagtgattactaattcttccccagcagtgttttgcagtggctgaaggcacagacttgggactccagcaggtctggttctgagtcacagctctcccacttgctgccttcgtctctccctctgagccttggatgccttctccttgcaatgggaaggacctcaatgctcaccccctggtggatagcaggagtgtgggaagcagcagagcatctcagtgaagggcatggatgctggcgctgggctgcctgggtcaagccctggctctgtgccttatcacctggatagcccaaggaggttacttttctctccatgcttcagtttctttttctttttttaagagggagtctcactctgttgcccaggctggagtgcagtggcaggacctcggctcactgcaacctccgcctcctggcttcaagtgattctcctgcctcagcgtcctcctgagtagctgggattacaggcacctgccaccacgcctggctaatttttgtatttttagtagagacggggtttcaccatgttggccaggctggtctcaaactcctgacctcaagtgatccacccacctccgcctcccaaagtgctgggattacaggcatgagccaccgcgcctggctgtgcctcattttcttcttcagtaaaatgggcataatgatatttctgacctcataaggacattgtgaaggtgaaaagacataatgcattaagtggtttcagaactgctgacccaacaaatctaagattcagtatttattcacaggtctttaatttttttttttttagaccaagttttgttcttgtcacccaggctggagcgcagtggcacaatctcggctcactgcaaccctctgcctcctgggttcaagtgattctcctgcctcagcctcccgagtagctgggactataggcacccgccaccatacccggctaatttttgtatttttagtagagatggggtttcgccatgttgtccaggctggtcccaaactcctgacctcaagtgatccgcccgcctcggcctcccaaagtgctgggataataggcatgaaccaccgtgcctggccagtctttaattttaactgtcataaaactgagagcatatcaccatcactctactgttttcaaaagctagttgtttcaccttccctttggttgttacttatgtgatacacggttacttcatttgtttttgttcatattccatttggggcatttacccctctccatgctgctttttaattttaatttatttttattttttgatagatggggtctcactatgttacccaggctggtcacaaactcctgggctcaaacagtcctcctgccttagcccctcaaagtgctgggattattcgcgtgagccactgcacctggccccaaaacacattttaaaaaagcaacatggatgattgggcacagtggctcatgcctgtaatcccagcactttgtgaggccaaggcaggaggatcgcttgagcccaggtgttccagaccagcctgggcaacatagcgagattcacatgcctgtgttcccagctactcagaaggctgaagtgggaggatcacttgagcccaggaggttgaagctgcagtgagctgtgatcgtgtcactgcactccaatctggtcgacagagtgagacccccatctcaaaaaaaaaaaaaaaaaaaaaaaaaagaaaagtaatttggaggtggtaaatgaaatatttatatagtgttaaaagttagaaccatctttagctcacttgcttttgccaaattgcctgcccaggtccttctgtggctgctcactctctccccagcagtacacatgagctcctgtttcctctcgtccttgccaacacttggttttgtcagacattttagatctttctcagtccgatggctgggaagtggtatctcactgcagtgtgtgtatttgtatttttttccaatgctactggcgagcttgaccatctttgaccttcttttgtactatttaggttttagaggaaggagttggggcctcctgctttagccagagtacagagttagctcttccctccctgtagggggttcagtctcaaccaagcccagcaaaccatgagatgggggtccccattgttcaagggaggggctgaagcccagaggagacaagggagtggccctggggtcacacagtgatgggtgccagaggcaggctccagcacgagactcctgggcccttttcccagcagagggagcccgaggcaggaagtgactgtgtgggccagggcacccagacggagcccagctgcccctcaggagctgctactggggaagggacctgccaaggccctgctgtcccctggggcatacacaggagaggggttggctgccatccagcctggcacgtttcctggctgtcccatccacccttagggcactggggccaggctgggctgagggaggtactggctcggggtctgaggggtgtagtggtgtgcagtgtgtgagcgatctgtccccctcagcctctctcctgtcctcccgtcgccatctctgtgtctctctcttccctttgtgtccctctctgtcctactctctcactcccttctctctgtctctttatttattttgagacagaatcttactctgtcacccaggctggagtgcagtggcgcgatcttggctcactgcaatctccgcctcccaggttcaagcgattccccagcctccccagtagctgggattacaggcacccgccaccatgcctggctaatttttgtatttttttatttttattttttctttttgagacggaatctcactctgtcacccaggctggagtgcaatggcacagtctcagctcgctgcaacctccgcctcccggattccagcgattctcctgcctcagcctcccaagtagttgtgattacaggcgtgagccaccacgcccggctaatttttgtatttttagtagagatggggtttcaccatgttggccaggttggtcttgaactcctgacctcaggtgatctgcctaccttggcctcccaaagttctgggattacaggcatgagccaccaccccagtctctctgtctctttttatttgacttctctgtctctgcctccttcccgtgttcctcatgtcctccttgtgtcctctccctcatcccgtaccacacccgctgctgcagcaggctctctgggaccccacctcccaggtcctggccacgtgacccagaatcctctctcggggcctgttgccaagctgtgcttcctggccaagaagccagatggtggagtctcaagtcctggctccccagccctcagggacctggccagctggtcggcctcagccacaggctcctgcttggagagatgggggactggtctcctgccagatgagaaaatgcactagaggctttgcagctgccaggctctgtccctggggaccccacactttttccaggcccacccccaccctaagcaaagctctttctctggccaaggaaacaccctcctcccccctgttctgcttctctgtcccatgtttttgtatccagctcagcatggcctaggagaggagtgcacattcagggactatacagtcccagtccttgccttattgggactcaaggcaagggaccccatcctttctttctttccttttttttttgtttttgtttttttgttttttgagacagagtctcactctgttgcccaggctggagtgcagtggcgcgatctcagctaattatgtcttcataattcacaaattatgtcttcaatttatgaaggtgctggctcggggtctgaggggtggagtgatcagtaactcaaattacgtcttcacaaatctccttgtcttcatttctgagcaccgctttcttctgtgttggcctcatggtcagggagtccctgatgttggcaggatgaccccaggatgcccggcctacctcctcccaacttaggaagcccatgggaaagagagcatctcttctgtgcacacacattttcctggcgaaaatggggagagtggccgggcacagtggctcacacctgtaatcccacactttaggaggccaagatgggaggattgcttgaggccaggagttggagacccgcctggccaacacagcgagaccccacctctaccaaaaaagaaaaagtgggaagagttttcattggcccatctaaggttacgtgctcatatctgacccaatctttatgaccagggtgttttcagtgttctgcttggccccacttgggtcatgtgattacccatgactctctaggtttcatttgcccttcaggaagctcaggacctgagagtgagttttgatgtatttggaaggagaggatggattttgggcaggcaaaaccaacaactctgcactacagaactttgaatcaagaagtcttggcttggttcttgagtttggggttttgttttgcagtcatttgtggtaatctgctaccacttaattttttaattgttattttgttttcttctctagctttcctccatctgtttagaattacaagggtaatatatgaatatattcttttgggaaaaaattttactaaccgagcagtcttcagtaaaacataaagtctcactcctatctgcctcccaatcccacatcccaaagagagcctcagttatttggtgtgcatccatctagacctctttctgtgcatttacaagtgtacctatatggatgtttaatgtttttatattatttgcttttcatgtttaatttcaatttttgaataaataaattttcatggtgaagacatcaaaacctctagggaaatcccatgggaaaattatcgccttcatccctgttccccattcattaagttctcatcccctcccccagtaagtaccatctgttatgaacttcttgtttactccagggaatttttatgcatgtgcaatccactataaatttatattcataggtaggttctaaattgcttcttcttcttcctcttttttttttttttttttgtttgtttgttgttgagactgagtttcgctctttttgccaaagccggagcgcaatggcgcgatctcagctcactgcaacctccgcctcccgggttcaagcaattctcctgcctcagcctcccaagtagctgggataacaggcgcctgccacaatgcccggctaattttttgtatttttagtagagactgggtttcaccatgttggccagcatggtgtctatctcttgacctcgtgatccgcccgcctcagccttccaaagtgctgggattacaggcatgagccattgtgcccggcttttttttttttttttttttttttgagatggagttttgcttttgttgcccgggctggagtgcagtggcatgatctcggctcactgcaacctctgcctcccgggttcaagtgattctcctgcctcaggctcccgagtagctgggattacaggtgtctgccatcacgcctggctaattttttgtgtttttagtagagatggggtttcaccatgttggccaggcaggtctcaaactcctgacttcaggtgatccacgcgccttggcctcccagagtgctaggattacaggcgtgagccaccgcacccagcatgctttttcttcttaacagtaacacttggctatttttccatactggtctggatttgtttaaccattttactcttttttattttttatttttttttaagagagggggtctagctgtgttgcccaggctggtctcaaactcctgggctcaagcatttctcccacctcaacctcctaagtagctgggattacaggcatgagctgctgcacctgacttaaccatttctctcttgatgggcattgaggttgcttccagttttttcccattataaactctgctgtgatactacaactttgtgcatctgtgccagtatttcttttttttcttaaaaaaatttttattattattatttaaaaatttttttttcaggatggagtcttgctgtgtcacccaggctgaattgcagcgacgtgatctcggctcactgcaacctccacctcccaagttcaagcaattctcctgcctcagcctcccaagtagctgggattacaggcgtgcatcaccacgcctagctaatttttgtatttttagtagagacagggtttcaccatgttggccaggctggtctcaaactcctgaccttgtgatctgcctgccttggcctcccaaagtgctgggattacaggcgtgagccactgcacttggcctatgacagtatttctttagttatattactagaaatgcaagtgctgggtcaagcagatgcatattttgcattttgatgcaaagacctgccaaattgccttctaaaaaggctctaccaatttatgccaccactgacagtggctgagtgtgcccatctcccaacatctttgccagcattagatactataagtcttttacatttttgccaacctaatgtgtagaaaagaatgccttggccaggcgcagtggctcactcctgtaatcccagcactttgggaggccgaggtgggtggatcacctgtagtcaagagttcaagactagcctggccaacatggtgaaaccccatctctattaaaaattcagaattggccaggcgtggtggctcacgcctgtaatcccagcactttggaaggccaaggcaggcagatcacaaggtcaggagatcgagaccatcctggctaacatggtgaaaccccatctctactaaaaatacaaaaaaaattagtcaggcgtggtggtgggcacctgtagtcccagctacttgggaggctgaggcaggagaatgccgtgaacccaggaggcagagcttggagcttgcagtgagccaagatagcaccattgcactccagcctgggcgaaagagcgagactctgcctcaaaaaaaaaaaaaaaaaaaatcaaaattaaccgggcgtggtgatgtgtgcctgtgatcccagctactcgggaggcggaggcaggagaatcacttgaactgaggaggcagaggttgcagtgagccgagatcatgccattgcactccagcctgggcaaaaagagcgaaactccatctcaaaaaaaaaaaaaaaagaaagaaagaaagaaaagaaaaaagaaaaggaagtcttgttttaatttctattttccagcttattaataagactgagcatcttttcatatgcttgttttgtctgttgcctgttcacatctgatgcccatttctctttttgggcagtcctttttttttgctgatgtcattcatgtatgcattgaacaaatcataactggaggcctattgtgtaccaaaaattgttctaggctttcaagaatatagcagtgagtgtgacacagcccctcccatcatgtgggtcacattctggaagcaagggaccaataaaaatacaaaagtacctgagtgcagtggctcacacctgtaatcccagcactttggaaggccaacgtgagaatagtttgagtccaggagttcaagaccagcctgggcaacatagcaagaccccatctttatgacaaatttcaaaaatgagctgggcatggtggtgtgtgcttgtagtcctagctacttgggaggctgaggcaagaggatcccttgagcccaggagttcaaggctgcagagagttattatcttactactgcatgccaacctggatgacagagcaagaccctatcaaaaaacaaaacacacacacacaaatcaagagagttgtctgatggtggtaagcactgtgaagacgaagcaggatggagggaaattctttgattgttaaactagttccttgcactgatacatatcaatttttacagtttgtcatttgccttctaactctatgaaattttggttgatgcagaagtattttttaattatttttttaattatactttaaattctagggtacatgtgcacaatgtgcaggtttgttacataggaattcatgtgccatgttggtgtgctgcacccattaactcgtcatttacattaggtatttctcttaatgatatccctcccccctccccccaccccatgacaggccccggtgtgtgatgttccctgccctgtgtccaagtgttctcattgttcagctcccacctatgagtgagaacgtgtggtgtttggttttctgtccttgcgatagtttgctcagaatgatggtttccagcttcacccatgtccctacaaaggacatgaactcatccttctttatggctgcatagtattccatggtgtatatgtgccacattttcttaatccagtctatcattgatggacatttgggttggttgcaagtctttgctaatgtgaatagtgccacaataaacatacgtgtgcatgtgtctttatagtagcatgatttataatcctttgggtatatacccagtaatgggatcactgggtcaaatggtatttctagttctagatccttgaggaatcgccacactgtcttccccaatggttgaaccagtttacattcccaccaacagtgtaaaagtgttcctgtttctccacatcctctccagcatctgttgtttcctgactttttaatgatcgctattctaactggtgtgagatgatatctcattgtggttttgatttgcatttatctgatgaccagtgatggtgagcattttttcatatgtctgttggctgatgcagaagtatttttatgtgatcaaattataaatctttccctttatgttttttatgcttggaaagatttttctccatcccaacattataaaagcatttgcccaggttttcttttagtgccttatggatttacttactctgtttaggtctttaatccatctggaattgttttcagtacaaacagcaaggaaaggatccagctaaattggttagccattggcccatgaccattcattaaataatccatctttcccttggggatttgaattggcacctatgaaacacatgaattttcctgtgtatttgggtctgcttttgcactttctgtctattcctaagacacagcagccatccaaattactatagctttgtatttatttttgataatttcttactatcaaatttttttatccggtaatcccagcactttgggaggccaagatgggcagatcacttgaggttatgagtttgagaccagcctgaccaacatggtgaaaccccatctctactaaaaatacaaaaaaaattagcaaggcatggtgtcaggtgcctgtagtcccagctacttgggaggtcaaggcacaagaatcacttgaacctgggaggtggaggttgcagtgagctgaggttgcccactgcactccagcctggatgacacagcacccaggctgatttgttcatcctgaggtcaggagttcaagaccagcctggccaatatggtgaaaccccatctctacaaaaatacaaaaattagccgggcatgatggcaggtgcctgtaatcccagctactcaggaggctgaggcgggagaatcacttgaagccaggaggtgaaggttgcagtgagccaagattacgccattgcactccagcctgggcaacagagcgagactccatctcaaaaaaaaaaaaagcgttaacaaaaaattattactatatttgatggtaataattttggaaagttgactctttggacaaattctttaacttctcttggccttggtttcctcctctgtaaaacagggagactaccaatcttgaaggttgttctgggaattagtgaattaatggaccactttagttccggggtcaggtaagcctctttgagaaggtaatactccagctgaaatctgattgacaaggaagagcatgcctggcagaggaaacagcaaaggcaaaggctccgaggcagggactagcttagtgtgatgcaggttcatgcggagcgcatcgctcctggaggggactgaacaaggagagggtggaagggtgggccgcggtgaggggtctggctgtcaccataagggtactggagagccacagcaggatcaggagggcgggtggggcccattgaccctgcctctgtccccacagtccatggagtcgcaggtggaggagtggtaccgcgaggtgggagagctgcaggcgcagacggcggcgctgccgctggagccggcgagcaaggagctggtgggtgagcggcagaacgcggtgggcgagcgcctggtgcgcctgctcgagccgttgcaggagcgccgccgcttgctgctggcttccaaggagttgcaccaggtggcgcacgacctggacgacgagctggtgaggccagcgcaggggcctggggcggggcggggcggggcggtggggcggagaaggtgggcatggggcggggctgaagatggagacggctgagaccctcccactcatacgctgaaagacgcattcagccgttcactcattcattcattcacactcatttactcactttgaatcattcgttgatttattcatgaagtcactcatttatttattcactcatccatagtttgttctttcctccactcatttatttacttaactattcattcattcactcctctgttcctcattccatcactcaatttcctgatttgctcattcatttgttcactcagttgatcattctagccccagccctgtgtttggatgatagtggggccacaggggtggccaaggcagaccccattgtgccccagagggttcagagtccaacggggaaaacagacttgtccccagacagtgacaattcagggtggttaggaatatgataggaaacaagacctgtatgtgcaaaggccaacggtgtgagcctggcttaagtgcagacagcaagaaagagtatgtcaacagaggagactgagacaggtgtggtggtgcctgttgtcccagctacatgggaggctgaggtaggaggattatttgagcctggggattcgatcccatctcaaagaaaaaaaaaaaacaaaaaatggaggaggctgaatattcaactgggctcttaggcaaggaagggcctgggatgccgtgcaggtttaaagtttagttgcgatgcaggggttcttggatgcattctccccttgacctgcttcctgtgtcctctccaggcatgggttcaggagcggctgccactggccatgcagacagagcgaggcaacggtttgcaggcggtccagcagcacatcaaaaagaaccaggtgagcagagccaggtgagggagcgagttaggacatttggatacatgtgatagaaacagctgaaggtggttaaagccaaaacaatgaatgtattggcttttggaattaacaagactgtggacagcagatacagatgtatccaggtgcttccatatattttcatgactcttggctctattttttttttttttttgagatggagccttgctttgttgcccaggctggagtttagtggcacaatctttgctcactgcaacctccacttcctgagttcaagcgattctcctgcctcagccatccaagtagctgggattacatgtgtgcaccaccacacctggctaatttttgtatttttagtagagatggacggcggggggtggggtgtttcaccaggttggccaggctgggctcgaactcctggcctcaagtgatccactcgcctcagcctcccaaagtgctgagattacaggtgtgagccaccgcgcccggcctgtttgtttttctgcatgagctttcttcttaggccagtcctcctctcctggtgataaaaggcctccagtggattcaggtttacctcccaccagcaaaactgaagagaatttcccacctcaataatgtcagcagtagtctcaggaataactctcattggctcaccatgcccatggcatcccacgcccatccctgaactaatcatgatggatggggtttcggactgctccttgggctggcctggttaagcgccctcccctggaacctgctgctggaatcagccttagcttaattaccaaggctgagatggaggcaaagggggtttcccaaaggaaaatcaggggcttgagactagaaggaaggggaatagctattggacaaggaaaaagtaaaacaacaacaaacaaaatcacaaaacatcgagttagcctggtgtgatggtgtacccctgtagtcccagctactctggaggctggggagggagggtcccttgagtccagaggtcaaagctgcagtgagccttgaacaccccactgcactccaccctgtgcaacagaatgagaccctatctctctctctctctcacacacacacacacacacacgtcccccaaaacaaacaaacaaaaacacccatagggacaaaggacagagataatcagcaagaggatactactgccccctaacctgagcaaggtgggggagggggcctttgagctcctaaaaaatctctgaatctgttcattcctctggggctcagtttccacatctaaagtagagttggtttagagcagtggttctcaaactgcatacgaagggaaccccttggtcaaagcaactatttcaccaaagcctaaagcaagacataaaagaggaataataataataaggcattgtgccaggtgtggtggctcatgcctgtaatcccagcactctgggaggccaaggcaggatgatcacttgagcccaggagtttgagaccagcctgggcaacatggggaaaccccgtctctaccagaaatacaaaaattagctgagcatagtagaaggtgcctgtaatcccagctacctgggaggctgaggcaggagaattgcttgaacccaggaggcagaggttgcagtgagccaagatcacaccactgtactccagcctgggtgacagagtgagaccctgtctcaaaaaaaaaaaaaaaacatcgattaaagatttactaagtgctggctgggtgcagtggctcatgcctgtaatcccagcactttgggaggctgaggtgggtggatcacctgaggtcaggagttcgagaccagcctgaccaacatggtgaaaccctgtctctactaaaaatgcaaaaaattaaggccaggtgcggtggctcacgcctgtaatcccagcactttgggaggccgaggcgagtggatcacgaggtcaggagatcgagaccatcctggctaacacggtgaaaccgcgtctctactaaaaacacaaaaaattagccgggcgaggtgtcgggcgcctgtaatcccagctactcgggaggctggggcaggagaatcgcttgaacctaggaggcggaggttgcagtgagccaagattgcaccattgcaatacagcctgagtgtcaagagcgagactccgtctcaaaaaaaaaaaaaaaaaaagattaaaaaaaaaaaaagatttactgtgtgctaagtactgtcttagggtttatgctgattatttaatttaatcccctctataaccctatgaggtagatattgtcattatcctcatttcaccaaacaatgtatgttggaagaatagggcactgaaggatggtggggaggtgggtctacagattattttggaagcttcctgatcattctgcagtaggtagagttatttaagagactggagttttgctgagattttgttttcctgtcttgatgaaaatactcttggctgtcaacagtgtgggcgacagaactggcttatcgttgtcatggttgaggaaactgatcaagtgcacttagtacttaaaattgggggagctcagctgtgtgtgcagtgagagtgctggatacacaggggctgttaagccaaaaatagctgcaaatatgatgcatttggtgcatgcagactcagttccaagtgctccatagtttatcaccttataacaaccccgcaaggtagattatctcagcctgatactagctgtgtgaccttagcaaattcctcaccctctctgtgcctcagtcttctcatctgtaaaatggagatggtaatgttgtctggctccataggttgggagtgaggaggtgtgaggctatattatgtaaagctcttacttagcaaagcacctggcaggtagcagggtagcagacactcaagaatcgttggctggccgggcacagtggctcatgcttataagcctagcactttgggaggccaaggtaggaggatcgcttgaggccaggacttcaagaccagcctgagtaacatagcaagacctcgtctctccaaaaatattttttaaaatagcagggcatggtggtgcacacctgtagtcccagccgcttgggaggctgaggcaggaggatcacttgagcccaggagtttaaagctgctgcattccatcctgggtgatagagtgacaccctgtctctaaaaaagcaaaataaggagaggacttgctggctgttattatctttatcagttgagtcacacaaaaagttaaataacgttaaggcacacaaaaagttaaaaaagactcacaaaaagttaaataaggtactctgtaagtaaataaggttaaggcacacaaaacgttaaataaggtactctgcaagtacagagctggttgagggaaccttctgggggatggaagtgttccgcacgctgatctgggcacaccggtgtatgtgtctgtacaaatgtgtgcaactgtatacctaagatttgtgcactctaccgtatacaaatgatacctcggctgctaagctgcagggtttctgtattagggcccatcttgggtcggcaagcggcttggctcagagcacagtctctggaaccagcctcctgtgttcaaatcctgtcactccttactggctgcttgttcttgggcgccgtacttcgcccctctgtgcctgttttcccacctgcagcaagcatagggttatgatgagtgagggagtatcagcaaaatgtttacatggtcttggcacgtggttagcgagctgggggtgcttgttaattgccccgtgggccgtgccagtagcagaggagcgtgtggtcttgcagggcctcggaacgccccctctccacccacatccccttacctcctgcccccagggcctgcggcgggagatccaggcgcatgggccgcgcctggaggaggtgctggagcgcgcgggcgcgctggcgtcgctgcgcagcccggaggcagaggcagtgcgccggggcctggagcagctgcagagcgcctgggccggactgcgggaggctgccgagcgacggcagcaggtgctggacgccgccttccaggtggagcagtactacttcgacgtggctgaggtggaggcgtggctgggcgagcaggagctgctcatgatgagtgaggacaagggcaaggtgcgcccgagctgggggtgcggagggcctgggggcgctggagccgggggccgccgctgccgcctcatcgtgggcgctttgtgcccccaggacgaacagagcaccctgcagctgctcaagaaacacctgcagctggagcaaggcgtggagaactacgaggaaagcatcgcgcagctgtcgcgccagtgccgggcgctgctggagatggggcacccggacaggtgggcgggcgcgtggccagttcacaggaatggtccagcaggacctgaagcttcgctgttgggagttggcgcagcgctggaattggacgttgggtgggagaggtcctccttgctgtgtgctggagccctcgaatttggcaagtgggcgggccggaatggggggacacggctcagggatggttgagagggtggggccaggagcacctggatttgagtgtagtagtggggaccttgtcgggggagaaaagagtaggcgatgtctaggactggggtagagaagaatttactcaggacaggcaaggggctctttctactcagtgtctgggaggacagaaaagcctgtgctgagattggctatggcggtggggctggagacctcctggtgcagtggggtgatgttgcctcgtgtaggcggatgctgagctccaggcctggaccagggatggaatctgtaaggaggtacagagagagacctctgtccaagtgggctcagagattggggctagaggtgggatgcattggctggggacccaacctgggagtccagagtcccaccgaggttcctggataggaggggcgtgagactgagatagaaaccgggtgaggctgccgaggtgggcggatcacttgaggtcaggagttggagaccagcttggccaacatggtgaaaccctgtctctactaaaaataaaaaattagctgggcatggtggcacgtgcctgtagtcctagctactggggaggctgaggcaggagaatggcttgaacctgggtggcagaggttgcagtgagccgagatcgcgccactgcactccagcctggtgacagagcaagactccgtctcaaaaaaaaaaaaaaaaaaagaaaagaaaaaaaaagaaaggaaactgggtgaggctggatagaggtgagcttatccatttagggaagcggagctttccctgcatgctgaaatgcagggctttctgaacccaagacttgcagaaaacagagtcctggccaggtgtagtggctcacacctgtaatctcaacactgggaggctgaggcaggaggatcgtttgagcccaggagtttgagaacagagggaacatagtgagacctcatctctacaaagaaatcaaaaagttagccaggtgtagagtcacgtgcctgtggtcccacttgggaggctgcaatgggaggattgcttgagcatgggaggtggaggctgcagtgagttgtgatcacaccactgcactccagcctgagcaacagagcaagaccctgtctccaaaaaaaaagaaaaaagaaaagaaaacagagctctacctggggacacagccgtgtctgaagattccaaggaaacacagccctgtcctggggagggggtttaggggggtcacgctctgccccagaagtctcaggggtccatccctgcccctccatgtcccccttcagcgagcagatcagccggcggcagtctcaggtggaccgcctgtacgtggcgctcaaggagctgggtgaggagcgccgggtggctctggaacagcagtactggctgtaccagctcagccgccaggtgagcgagcttgagcactggattgccgagaaggaggtggtggctggctcacccgagctcggccaggactttgagcatgtctcggtgagcatcattagtaataagtgataccaggagctaccactaaggttctctgggccttagtttcctcatctgtagtatgaggataataacagcacccgcctcatggctctgctgtgagacaaatgagttaatataacgtaaagcactgaggaccctgcttggcacacatgctgcctcacacagtgttggttattattatcagcttattattttattgttacttattgttatttttattgttactgttttgttactattcttgccaggtgttcagtaagtgttagatattattttttatgatgatgatgatgatgatgattatcattactcttacctgccacaaaatggtagcctctgccaggtgtggtggctcatgcctgtaatcccaacactttgggaggccaaggcaggtggatcacttgaggtcaggagtatgagaccagcctggccaacatagtgaaaccccgtctctactaaaaacacaaaaaaatcagctgggtgtggtggcacatgcctgtagtcctagctgtttgggaggctgaggcaggagaattgcttgaactggggaggtgaaggttgctgtaagtggctattgaaccactgcacgccaacctgggcgacagagcaagactctgtatcaaaaagaaaaaaaaacattgtaggctggagggggctggtgtatgctgcccctttgctcactttgctgtacccccccccccacttcctgatggcaggtgctgcaggagaaattctcagagtttgccagcgagacaggtatggcagggcgggaacggctggcagctgtgaaccagatggtggatgagctgatcgagtgtggccatacagcagcggccaccatggccgagtggaaggacggactgaacgaggcctgggctgagctgctggagctcatgggcacacgggcccagctgctggccgcctctcgggagcttcataagttcttcagtgacgcccgagagcttcagggacagattgaggagaagcggaggcggctgccccgcctgaccaccccgcctgagccgagacccagtgccagttccatgcagcggaccctgagagcctttgagcatgacctgcagctcctcgtgtcccaggtggggcgccggtggccatcagggcaggtgggagggcctggacagctgtgggcagcagagtgggcaaaaatcaggctgtggagcaggtcgaaattaggcagtggcacagacagaaagcggactacagaacaggaagaaattagataatggagcagatagaaaatggactgatggaatgatatatagaaatcaggtattggcagggaaaagtggtaccttagaaggtctcacagatattaaacagcttctggctgggcgtggtggctccctttgggaggccaacgcaggcggatcatctgaggtcaggagtttaagaccagcctggtcaacgtggtgaaaccccatctctactaaaaatacgaaaattagccaggtctggtggcgggcacctgtaatcccagctacttgggaggctgaggcaggagaatcacttgaacccgggaggaggaggttgcagtgagcccagatctcgccattgcactccagcctatgtgacaagagtgatactctgtctcaaaaaaaaaaaaaaaaaaaaaagcttccaatagatattgggcagtggttctcctaaaactgtgagttttgcctaaatccagatcaagggtctaaagggaattttgagaagtctgagaggaatttggctgtggtgtagatagaaattagacgacagacaaggccaggtgcggtggctcacgcctgtaatcccaacactttgggaggtcgaggcgggcagatcatgaggtcaggagttcaagaccagtctgaccaacatgatgaaaccccgtctctactaaaaatacaaaaattagcaggaatggtggcgggcacctgtaatcccagctacacaggagactgaggcaggagaatcgcttgaacccgggaggcggaggttgcagtgagccgagatcgcgccactgcactccagcctgggcgacagagtgagactccatctcaaaaaaaaaaaagaacttagataacaggtctctgatggaaatcatatgacttttctgaaattaatttgatgggggcgaatttaatgaaaaaggcaacagagatattagaaattaggcagaggttctggccagaattcggatgtggatctgagcagtcagatggaaatgaagctgcaggcccaatacaactcaggcagcaggaaattgggttgcagttctaatggaaggtagaagttgggcaatttttgtttgtttgtttgtttatttttgagacagggtctcactctgtcacccaggctggagtgcagtggcgcgatctcagctcactgcaccctctgcctcccaggcttaagcgattctcctgcctcagccttccaaatagctgggattacatgcacgcgccaccacacctggctaatttttatatttttagtagagacgggatttcaccatgttggccaggctggcctcgaaatcctgacctcaggtgatctacccgtctcggcctcccaaagtgctgggattacaggcatgagctactatgcccagctggcaattattattattattattattattattattattattatgaggcagagtctctctttgtcacccaggctggagtgtagtggtctaatctcggctcactgcaacctctgcttcccgggttcaagcaattctcccacttcagcctcgagtagctgggactacaggtgcaagccaccacacccagctaatttttgtatttttagtagagatggggtttcaccatgttggccaggctgatcttgaactcctgacctcaagtgatctgcccgccttggcctcccaaagtgctggggttataggcatgagccaccgcgcccagcccagttattttttataaatcctacaaatgacttagaaatcaggctgagagattcatagtaataagtggtggatctgttagagatggggaggtcacaccaaaataaatcaggagattgaaccaacagagtgagcagcaggctgagcacagtggcttatgcctataatctcagcactttgggaggccaacctgggaggattgcttgagcccaggagttcaagatgagcctgggcaacatagtaagactccatctctattacaacatatatgtatatatcctgatacagtggcatgcacctgtagttcagctattagtaggctgaggcaggaggatcacttgagcccgggatgtcaaggctgcagtgaattgtgtttgtgccactgcactgcagcctgggcaacagagcaagaccctgtctcagaaaaacaaacaaaaaacccaaaacccaaaagatagagtgagcagagctcatacagcagaatgaatggaaattgggcaggggagtaatggcaattgaacagccgtcgtgtaggaaactgggctactatgaaggagtgggtttgaaataaactgagttaaaaaaaaattagcacatctaaaagacatcaaagtggaaaggggtttcctgaaagacccaaggtaggggtgggcctgcctgaaaacacaggtggcagacccaatagaaataaagctctcagaccaaaagaaatcaggcagtgggttgaaagagatgtggtagtagatctaaaagaagtcagaatgcgggtaagtcaaagagaaatcaggcagcagatatgacaggagcctggctgtgggatcacagtgtgaggctccttatatcttgaggttctgcgctggagcagatggtgggagggagggcacagcctgggccccgtggagggctggcgcccgacctggcatgcccttcaggtacggcagctgcaggagggggcggcccagctgcggacggtgtatgcgggtgaacatgccgaggccatcgctagccgggagcaggaggtgctgcagggttggaaagagctgctgtcagcctgtgaggatgcccgcctgcatgtcagctccacagccgacgccctgcgcttccacagccaagtccgcgacctgctctcctggatggatggcatcgccagccagattggggcagccgacaagcccaggtgcccctcatccctcctcgggcttcctgcctccccctggtggcctaccccagccacccccagcccattgacagcccccttctcaatggaatgacaacagccaatatctgtgtggcgcctctgtgtgctaggcactgttctaggtgcttcgtgtgtattcagaccccttttttaggcctgtcattggggacttcggtcatggggcatccttctgtccgctgtccttcccagttgcctattattaccctctccatgggatgtcacagcatgaaacaggctaaagacaggatgggcaagggaggtgtgggactgtatttgtgagggtgggtgaagaattctaacaattccagcatctcagtggcttcattagtgggcatgggcttattgctcacatagtggttggatgtgagtgtccagcagaatcctgtcccctggtgattgggagccagggtccttccatcatgccaccctgggagtcacatgctggaccctctgcatcccgctgcagatgggaaaagatagcaggaggatcacacagaaggttttagggataaagccggcacccacacactgccagcccggtggcctaacctgtctgccagggaggctgcaaatttttttttctcttgagatggagtcttgctctgttgcccaggctggagtgcagtggcacaatatcacctcactgcaacctccgtctcccaggttcaagcgattctcctgcctcagcctcccaagtagctgggactacaggcgcccaccaccacgtctggctaattttgtatttttagtagagaaagggtttcaccgtgttggccactctggtctcaaactcctggcctcaagtggtccacctgcctcagccttccaaagtgctgggattacaggcataagccaccgtgcctgacctaggctggaaatttagtttcatggtgtggctaggaagaaaaggacctagggaatcagggacacctggcattgcttctgggaatgcagatcctgcagcctgcattcatttactcagcaaatatgtattaaatgcatatggtgtgccatgtggtgagcaaggccaagcacttgccctgagacagattgcattctcatagcacttattactttctgaaatatagcatggggatggggcacagtggctcacgcctgtaatcccagcactttgggaggctgaggcaggcagatcacctgagctcaggagtttgagaccagcctagccaacatggcaaaactccgtctctactaaaaatacaaaaattagccaggcatagtggtggacacctgtaatcccagctacttgggaggctgaggcaggagaatcgcttgaacccgggaggtggaggtcacagtgagccaagatcgtgccactgcactccagcctgggtgacaagagcaaaactccgtctcaaaaaaaaaaaaaagaaaagaaaaaaaaatgaaatatagcgtgggtatatatacatacataggaagggaatgatagctggcaaagtctctctgaggatgtgcgtttgactggagacctgaatgaagtgatgggtgagtcaggtaaagttttgagggaagagttttctaggtggagggacccacaagtgcaagggcccagaagtgggctgtagttaggcatgtgtgaggaaaagctagagatcactgtggccagatggagggagggagtgagggagtgtagggtgagaggaagtgagtacagaggggcactggggccctggaaaccacacatggtgaggagcatgccttctctatgaggaacgtgggagccatgcgagagtttagagcagagtggagtgatgtgatgtgtacatttgagaaaaataggccgggcatggtggcttatacctgtcatcccagcactttgggaggccaaggcgggtggatcacttgaggacaggactttgagaccagcttggccaatgtggcgaaaccccgcctctactaaaaatacaaaaattagctgggtgttgtggcatgtgcctgtagtcccagctactggggaggctgaggcaggagaattgcttgaacctggaaggtggaggttgcagtgtgctgagatcgtaccactgcactccagcctgggcaacagagcgagactctgtgtcaaaaaaaaaaaaaaaaaaaaaaaggctgggcacagtggctcacacctgtaatcccagcattttgggaggctgaggtgggtggatcacttgaggtcgggagttcgagagcagcctgaccaacatagagaaacctcatctctactaaaaatacaaacttagccgggtgtggtggcacatgcctgtaatcccagctacttgggaggctgaggcaggagaattgcttgaacccaggaggcggaggttgcggtgagccaagattgtgccattgcactccagcctgggcaacaagagcgaaattccatctcaaaaaaaaaaaaattaaatatacagggaagtaaaggtaacccacatgtgtatcgtgaacacttggcttgaacaaccatcaacatttggccaatctagccaaaagaggtggctcacgcctgtaatcccaacactgggaggccaaggcaagaggatcacttgaggccaggagtttgagactaccctacgcaacatagtgagaccccatctctacaaaaaagaaaaaaattagtcaagcatggtggtgtgcatgcctgttgtcccagctacttgggagtctgagggaggaggatcacttgagtccaggagggtcaggctgcagtgagccatgattatgccatttcactccagcctgggtgacagagcgagattctgtcttaaaaaaaaattttttttttttaattagctgggcattgtggtgcatgcctgtagtcccagctaccctggaggctaagccaggatgatcacttaagcccaggtggtagattcaaaccatagcatgaagctatgattgccaactgatggaaccttcagaaacttggaatttgttttggacataagatggcttagaatggtgctgtccaatagttatataacacgagccacaaatgcgagccacatatatactttaaaatcttcttgtggccatactaacaaagcaaagcaaatgaaacttaattttagtaatacatttttatttaacctgacatacccaaagtattatcacttcaacaggtagtcaatattaaaactattaatgaggccaggcagtttcgaacttctggcctcaggtgatccgcccgcctcagcctcccaatctcagccaagcggagatcgcaccactgcagtccagcctaggtgacagaaggagactccatctcaaaaacaacaacaaccaaaacaaagaaacaaaactattaatgaggccaggcgcagtggctcatgcctgtaatctcggctgagattgggaggctaaggcaggcggatcacctgaggccagaagttcgagaccagcctggccaacatgccaaaaatccatctctactgaaaatacagaacaaaaaattagccaggcttggtggcgggcacctgtaatcccagctactcgggaggctgaggcaggagaattgcttgaacccagaaggtggaggctgcagtgagccaagatcacgccattgcactccagcctgggcaagaagagcaaatctctgtctcaaaaacaaacaaacaaacaaacaaaggctgggtgcggtggctcacgcctgtaatccctgcactttgggaggcctaggcaggcggatcaactgaggtcaggagtttgagaccagcctgacaaacatgttgaaaccctgtttctactaaaaatacaaaaaaattagccaggcatggtggcaggtgcctgtaatcccagctactcaggaagctgaggcaggggaatcgcttgaacctacctagaagggggaggttgcagtgagcggagatcgcaccactgcacaacaacaacaaaaaactattaatgagacattttacattcttttttacattaactccacaaaatctggtgtgcattttacactttacaccaaaattcagactggccacatttcaagtgctcacatgtctagtggctactgccttggagagcacagacttggaacgttaaaatcattggctagtggaaccttcagaagcatagctagaaaaagtttgaaaatttggatcttggctgggtgtggtggcttatgcccatagccttgaactttgggaggctgaggcaggtggattgcttgagcccaggggtttgagaccagcctgggcaacatagcaagaccctgtctctacagaaaatgaaaaattagttgggtgtgatggtgtgcacctgtggtccccgctactcaggaggctgaggcaggaggattgcatgagcccaggaggttgagactgaagtgagctgcaatcttgccactgcactccagtctgggcaacagagcaagaccctattaaaaaaaaaaaaaaggaaaatttggatcttgaaatcctagaaggttagaatcaccaaagtgtgaaattttagaaacttggaaaatttgaatcattgaattagtgaaccatggaccctcagaatttggtcatcgaaagtaggtgtctcagtctggtttggtgactcaacgcctgtaatcccagcactttgggagactgagatgggaggatcacctgaggtcaggagttcaagaccagcctggccaacatggagaaaccccatctctactaaaaatataaaaattatctgggcgtggtggcaggtgcctgtaatcccagctactcaggaggctgaggcaggagaatcgcctgaactcgggaggtggagtttgcagtgagccgagatcgccccactgcactccagcctgggccatagggtgagactttatctcaaaaaaaaaaagaaaagaaaagaaaagaaaagaaagtaagtgtcttgaggtggtatgggatgtcagcctcaaggatttggggtcaccaggagccacatgtatggggcaggctgaggaggctccctgtggctcagatccctgcctgccacccactgcagggacgtgtcatcagtggaggtgctcatgaactaccaccagggcctgaagactgagctggaggcgcgggtgcctgagctgaccacctgccaggagctggggcgatctctgctgctcaacaaaagtgccatggctgatgaggtggggagcagggagggggtccccctctgccacccgggcacattggggtggaagccattccacaccctgacttccctcccacccacctgccactcccagatccaggcacagctggacaagctgggaaccaggaaggaggaggtgtcggaaaagtgggaccgccattgggagtggctgcagcagagtgagtgggggcccaggcacacgtggttcaagggcacagggacatgctccagcctgtccagccaaggcccagagggtgacaggagcatgctttgcaccctacccatgggtctccagaagcaaacataagggcctggaagggtggacaagggggctgccttgccattgaatacccacccttgaaaaaaaagtcttaaagtcctgggtggggggacattaaggaaggaggaatgggagtcagaaaggaggaatgatgcccactgaaatagccccagcctctgccattcctgcagagcccaggatggtcagggctcgggtatggaaagccggaggggtgtggaaggccaggggaacagccattgcccccaggaagggccccagatgccccagaatccttaccctgcatgcccctcctcagtgctggaggtgcaccagtttgcccaggaggcggtggtggctgatgcctggctgacagcccaggagccgctcctgcagagccgggagctgggcagcagcgtggatgaggtggagcagcttatccggcgacatgaggccttccgcaaagcggctgcagcctgggaagagaggttcagctctctgcggcgcctgaccacggtcagctccccagatactgccccattacccccacccccaccaagacccccacacccatggctctatatgagacagacacaccgagacatggtgcttggtcctgtgttgtgtgagtgccaagacagactcttgctaggctcccagtggagcagagggacagacctgtcaccagtgacagcccagaatgtcagggatgtgataggggaagaacaagcagagggatagtgcctgggatgggggagtgggagggggaactggcctgggggattctattctgagacttgaataattaggtgaagagaatgtagtaataaaaaggattaggccaggtgtgacggctcatgcctgtagtcccagcattttgggagaccaagatgggtggatcacttgaggccaggagtttgagaccagcctggccaacgtggtgaaaccccatctctactaaaaatgcaaaaattagctgggcgtggtggtgcacgcctgtaatcccagctactcgggaggctgaggcaggataatcacttgaacttgggaggcagaggttgcagtgagccaagatcgtgccactgcctgggtaacagaacaagactccatctcaaaacaacaacaacaataaaaaaaaaacaacaaaaaaaaaccgcttaaaggctgggtggggtggctcacacctgtactctctttggaagcctaggcgggaggatcacttgaacccaggagttcaagaccagccttggcaacatactgagaagccgtctctaccaaaaccaaaagcaaacaaagaaaaaacagccaggcgtgatggcacgtgcctgtagtcccagctactcagaggggtgactgagactcgaggatcacttgagcactggaggtcaaggctgcaatgagctatgatcttgctgcttgcactccagcctgggcgacagagcaagactgtctcaaaaataaataaataaataaataaataaataaataaataaataaataaagtcttaaagtcctgggtggggggacattaaggaaggagaaatgggagtcagaaaggcacgcagagcaattgatttacccaatttttaaaaaagtgatttagccaattcttaaaagagcaataggtgtttgccggagagaataggctttaagttcttggcagagagcaaagcatcgcacaggcctggacaccttgctttttcaaggaactggtcaattgagtgatgaggcagaaaaacccaggccgcctccccggacctcccccttaccccgccccggccccacgcctccaacctaaccctggtccctccatcctcagatcgagaaaatcaaagcggaacagagcaagcagccgcctaccccactgctggggcgcaagttctttggggaccccacggaactggcggccaaggcggcgcccctgctgcggccagggggctatgaaaggggcttggagcccctggcccgccgagcctcggacacgctctcggccgaggtgcggactcgggtggggtatgtgcgccaggagctcaagcccgagcgcctccagccgcgcattgaccggctgccggagatcccggggagggtggagcccgcggccctgccggccgcaccagaggacgcggcggagacccccgcgacccccgcggcggcggagcaggtgcggccacgaccggagcgccaggagtcagctgatcgcgcggaggagctgcccaggaggcggcggcctgagcggcaagagtcagtcgatcaatccgaggaggctgcgcggaggcggcggccggagcggcaggagtcagcggagcacgaggcggcacacagccttaccctgggccgctatgagcagatggagcggcggcgcgagcggcgtgagcggcgcttggagcggcaggagtccagcgaacaggagatgcccatcagaggagacctggtcaaggggtgaggtgcccgccttatgaccagaaagtgaggggaggggaaagcggagagctcctagaacccctcaggcccagtgaaagggcttcagggctcagaacttcccaaagaaggagatatcgccgcggtacccattttgcagaggtgtaaactgaagctgcaagataatcgatgtgcccattgttacacagaaaggggagcccttcctgttgaaagaaaaggcagactgcctttctccagacgtaggttctcggcccctgggttgtgactcctgcatcaagtctcccgggtgccccgaggcagggattttgtcctctctgtgcctcagtttgcccactgggctaatggtggaaccctcacctccttgattggagaggagaccctttatcacaattctctcagcagccttatgaagtgggggctgttgtcttctccattgtatgactagggcaactgaggcacaaaaagggcaagtcactcagcttaaacgaaccaggactttcagaatccagagttggccagtgtgtgttgtgcagatctgtccagtcagctgagtgtgtctccagaaagaggcctttggtcaggagacaatgacttcttgattctttttaaattgcacatttcatgaacatttgctgagtgcccactctgcctggcatgtgctgagtcgagcggtgactgaaccagtcccatccctgactttagagactcacagtccattgggaaaaacaggcttgtcatcaatgatgaccgagaattatctgggctggaatgggggcgattgggggactggagagtcaggggtgggtggagaaaggcaacgtttgcaagttgttctttgtgctgcttaaaattcaaaggggcatctgggcgcggtggctcacgcctgtaatctcagcactttgggaggttgaggcgggcagatcacttgaggtcagaagttcgagaccaacctggccaatatagcaaaaccctgtctctactaaaaatgcaaaaattagccggcatggtggcgcacgcctgtagtaccagctacttgggaggctgaggcaggggaatcgcttcaacacaggaggcagaggttgcagtgagccgagatcatgcaccactacactccagcctgggcaacagagaaagactccgtctcaaaaaaaaaaaaaaaaaaattcaaaggggcgagaggtttggtcttccattcagcagacacgtcccaaacacctgtggtacctaaggcgagcatctgagagaaacagctgcagaagtgggcaggggcctggcacttccagctaagaagtggaggctcctctgcccagccagacaggtccatgggagaaggaaccctggtttcactgggtctttctgtcccccatcccccaggaaggccaccctggctgacattgtggaacagctgcaggagaaagaggcaggcccagggctgcctgctggggtaagttgagcctcggatgggtggggataggaggacccctttttcagagcaggaggcaggatctcagaaacagccagtgcctagccctggcaggacccattccctacctggaccctgcagagacagcatggactctcagggtccccagaatctgaaaatgtcccccttagaaagacggggcacctacctaagagacccctactgcccctccacacacacacacacacacacacacacacacacacacagacacacacacacagacacacacacacagacacacagacacagatacacacacagacacacacacacagactcttcccacatctgtcctggactccgtatttcttcagctcagtggggtcccaaatttcttcatagcctcatacacacacacacagaaggaagccccaggtttctcctgcagacagtggggacacgccctgcttgcacccccacctccagagatctggctgcctctttccaccaccgagagagattccaaaccaatgagtcctaacagactcactcccaagacccatggggccctaagaattgggcctccaaccctgaggtcctcccatactcgcctccgagacaaatggccctgtagacagatgggaccccagacccatgactcccccaaacagatgacccccacaccctctccatggacagcacccctcttccccctcccttcacacagccgtcgctgcctcagccacgcgagcttcccccaggtcgcctgcccaacgggcttgagctgcccgagcggacacctcggccggaccggccccgggcgcgggaccggcccaagccgcgacggcggccgcggcccagagagggtggtgagggcgggggaagccggcgctcgcgctccgccccggcccagggcggctccgcccccgcgcctccgccaccgcccactcacacagtgcagcacgagggcttcctactgcgcaagcgcgagctcgacgctaaccgcaagtcgtccaaccggtgagcgtgtgggcggggctttggaaggcgggtctcaggctcagggtgaccattgcgtggagcggtgggactgaggagggggtgtggctcaacttcaggccctccagcaggtggcggtagtaggtggggccagagctggggggtggtggtggcttaaatcaagaaagccaaccaatgagcaggagggggtgtggtttaacgtcaggccctccaacccgtgggggtagtaggtggggccagatgaggggtggggctcaactttgatgattccaaccaatgaacaggaaggggcaggacctaaggttagtgcatctaatggatgatgggtagagcttaggtgggaacagaaggaaaatgttctgaaagtgagtaaattggaacctaacctcttagcaaccaacccaggagttgatcagctaaatagcaaagagggaggcatctagttgagaaggtttcaatggcttgtcgtggagcttggagaggtcactcaaccaatgagtggggtgggtctacccttgaagtttcaaattgggggagggtccgaaaacgggcagagcccaaactaatgagggtaggggttgggaagggggagtcatctcttacaggtttccaaatgagggtctagccatgatgtgcctgctcttggggagtccagctcctgcttgtccaccctctttttgtccaactgagaggcagaatctggggacaagtggagccaaaaaggggtatcaccggccagtaatggagtgagtcccaagatatgaagtgggcaggacagattcagattttgctagtggaatctgtaggtggtctttcttcctcgtacctaatgccaaggtaggaataaacaagggcacctagtatgttttgctttgggagggattcctccaggatcgaggctttggatgactggagagacaggaattctttattccagacagtagaccaatagactttccttgagaaagctccatgagtggggaggattgagtggagcaaaggcttatggaggagacagcttaagacttaccttcaggaaattcagtatgggaggggataaggaagggaaatctcagcctgggcaaaggcttgatactgagagacttaaatgctcccctcagggcagcaacagccttaaggaagagcattttaggtccaactagggcgcaactagggcgcaaaggtccagaggtaggaaggctcagacatattcagaccttgaggatgttaatgaagagttattaggcagagtgctgcggctctgccttgagccccatcttgtcgctccaggtcgtgggtgagcctgtactgtgtgcttagtaagggggaactgggcttctacaaggactccaagggcccggcatccgggagcacacacggtggggaaccgctgctcagcctgcacaaggccaccagcgaggtggctagtgactacaagaaaaagaagcatgtcttcaagctccagtgagccccccaatgggcaggagggagggatccaaggctcagcttcaactcccagtgggaccctggcttccctgggggacacttggtgggcaggtgggctgggccccttccccagatctctgaagtcctgtgtcccttcctgcaggacccaggatggcagtgagtttttgctccaggcaaaagatgaggtgagatctggtcctttcctccctctgtgtggacctcagtaatgacctggctgtctggctcctgacccagagtgatggggctgtgagaagggacactcacaggccagagttatcagggctgtaatgggaaagcccacaggcactgagagcccaaaggaggttcctaacccagtggggagtgggaagggcttcagggagggctgcctgcagatcctgatgacaaagtccaacatctttgccgtggtcactcaggtgagactggaatggagggagttcgctttaaaaaggggtgatttggccaggcgcggtggctcacgcttgtaatcccagtactttgggaggccaagacgggcagatcacctgaggtcaggagtttgagaccagcctggccaacatggtgaaaccccgtctctactaaaaaatacaaaaattaactgggcatggtggcaggtgccttaatcccagctacttgggaggcagaggcaggagaatcgtttgaacctggaaggcggaggttgcagtgagctgagatggagccattgcactcaagcctgggggacaacagcgagacttccttcgaaaataaaataaaaataaaaagggtgattcagagggacagtgggggtctaaaaaaaggagtgattcaggttgggcaccatggctcaggcctgtaatcccagcactttgggaggccaaggcaggagactgcttgagcccaggacttcaagatcagcctgggcaacacggaaagatcccatctctatgggtaataataataataaattagccgggagtggtggcacatgcctgtggtcccagctactcaggaggccgagtggaaggatcacctgaaccagggaggtcaaggctacaatgagctgtgattgtactatggcactccaggctgggtgacagagtgagattctgtctcaaaaacaagagggggtgggtgatctaggtagagggaactgcaagtgcagaggaccagaggtgcagtattgcaaagggttaactgctggagggcagagttcatggaagaaggtcccagaaaggttcccaggagataggtgtctcaggacaggatgggccatttggaggagattggattttttacctaagggcactggagagctaggggggattacagtgatgtgtaaaaaagattcctggctgggcgcagtggcttacgcctgtaatcccagcacttcgggaggccgaggcgggtggatcacctgaggtcaggagtttgaggccagcctgaccaacatggagaaaccccatctcttatggtgcatgcctgtaatcccagctactcgggaggctgaggcaggaggattgcttgaacccggaaggcagaggttgcagtgagctgagacagcgccattgcactccagcctgggtaacaagagcaaaactccatctcaaaaacaaaataaacaggccgggcatggtggctcacgcctgtaatcccagcattttgggaggccgaggcgggcagatcacaaggtcaggagatcgagaccatcctggctgacacggtgaaaccccgtctctactaaaaatacaaaaaaattagctgggcatggtggcgggcgcctgtagtcccagctacttgggaggctgaggcagaagaatggcttgaacccgggaggtggagcttgcagtgagctgagattgcgccactgcactccagcctgagcgacagagcgagactccatctcaaaacaaaacaaacaaacaaaacaaaacaaaacaaaacaaaacaaaaaaagattcctttggctacctgggtgggtagcccaggccgcggccagggcagggacccaagtgggagagcgcatggctgggccacacaggcctgtggggagaggaggaagaggagtctgagagaggcaagcataaaggtggtttgaagagatgttgagagtaataactaacacttgttatctcattcaatcttcacaagatgcaatgaagaagtgggctttttttttttttgagacagagtttctctcttgtcacccaggctggagtgccatggcgcaatctcagctcactgcaacctccacttcccgggttcaagcgactctcctgcctcagctacctgggtgactgggattacaggcttgcgccaccatgcccggctaatttatgtatttttagtagagacggggtttctccatgttggtcaggctggtctcaaactcctgacctcaggtgatccacccgcctcagcctcccaaagtgctgggattacaggcatgagccaccacacccggccagaagtaggcctttacccactacatgccttcttttacttatctgcacaatgaagattaaaaatagtttcttggcctggcatggtgcctcacacctgtaattccagcactttgggaggctgaggtgggcagatcatttgaggtcagaagttcaagaccagtgtggccaacgtggcgaaaccccatctctactaaaaatacaaaaagtagccaggcatggtggcacgtgcctgtagtcccagacactcaggagactgaggcacaagaatctcttgaacctgggagatggaggttgcagtgagctgacatcgagccattgcactccagcctgggggacagagcaagactctgtctcaaaaaaaaaaaaaaaaaagtctcttatcatagggttactgtgagaattaaattgctccatgtttaattgatacatgataaactgatacttagcacagggcctagtaaatatcagtgctctagtagtgcctgcccatattattatcattgtttgtgtcatttatctctgtagtaggaagtatatacaatcctattgcataggtttaagggaattaatccactaaagtgtttggaacagagcctggcacatattgctatgtaactgcatcatcatcatcatccctttttaatagatgagaaaactgaatttcagagagggtagtctgatctgaaattcacctattattccagcttctctcttccaaatacggcctctgtgccctgtttcttcccccaggaggagatgaacggctggctggaggctgtagcttcctcggtggcggaacacgcagagatcgcccgctggggccagacactacccactacttcatccacagatgagggcaaccctaagagggaaggcggagatcgcagggccagcgggcgcaggaagtgacttcccacccccaggacctgacacatctcgtctcccctcttttccgcactgtgggcacaaagacactttttcttccgcaggggcgggagcccctagttccaacactgaggacgcgtgacatggtgggcaccggaaaggaggggacttctcctgcaccccaagaagtggtggggagattgctgcccctatagccatatctcggccccttcccactcaccacccccaccccaggtgctgggggtcccttatttttatgcaataactgagcttgatgggggtgggcagggggccagttgagccaagcccccagccccgatctgcagatcctgccccaagaagctggggtggtgggggcagtaattcctgcccccctctctgccctagggatgggcacgggggcgctggtgaggtcccctggaccatccagggtgctagggggcagggaggggacaccccctccccgcctttacctcacttccaatgctgccttgatctctgtctgggaggggggagtgaaggggccctagccccctgcactccgccgcctcagagccatgcggttaattcctgacttagtttatttttgcaaaacgtcgatctcctcctcccccgccccgcatccgcgaaggcttttaatgggaggggcgtcaaagctcaaaactgttttcctctctcctcccccctccagttgtaaatgccacttcatgaggggaggggcgaggggaagcccacccctgcatgcttctggctggagcacctccctggggagtcgggggattgggttgtgggcagtccccatggccgcctggagaagccgctggggcccgggggtgtggggcggtgtggcgggcgcacactgtatgtacctataataaaccctttggctttgacggtctatggtcctttgtttgggttttctgggctgcgcccgggaggattgaaaggagggctgtggtggctgtaggggtgggtgcggggtggggagaggggcacgggggtaccgtggctgcggagaacatccagatgtacccttttatgtggacttaatttcggggtctaaacacacgccccttgacgagaacctagagggatggagaatatttcgttatgcttcgtaataaacttccccaaaggagactccgggtccgccccgtcaagttcaggaaaggcggacccctttaaggaggcggaaaagttaaccgcgatgggcaggcgctctgtccaatcgctagtgactcctggagtctctggcccaatgagcagcctatggaggcggggtccgggtgcacacccggaagtgggtgcgggccagccggctcgcccgggggccatggcagcagcggctactgcagccgagggggtccccagtcgggggcctcccggggaagtcattcatctgaatgtgggaggcaagaggtgagtgtgggagactcctgaggtcccatcctcgggggcgggaagcggggtgggagtatccgcctctcctgggggaatccctgtccatcaagggttgctccgccccccccccctttggaggcgcgagattctggaaaaacgccgggggagggggaaggggagggaaccctggatcctgcgggagggggacgcattcctcacccgctcctcttcatctcttgcgtccgtttaccttccccgcccagattcagtacctctcgccagactctcacctggatcccagactccttcttctccaggtgatcgggagagcgagtttggggcgagggtaggagggatggagagggcgtgggagacctaatatccactcccccggcccgtgacgcctgctcggtgtcccttccctgcagtcttctgagcggacgcatctcgacgctgaaagatgagaccggagcagtgagtcggacaagaactgaaatgggatgggggggaggggttggtaggaagaggggcaggaccccactcagtcctgccttttaccccatccatcctctgcccccctttcccgcagatcttcatcgacagggaccctacagtcttcgcccccatcctcaacttcctgcgcaccaaagagttggatcccaggttggcatggaaaaaggggagggagtccctcactgtcttcagtccctgaggagttctttcacctcctctgaatgtccacgtgagctccattctattagaattctcattcagaaccttgatcacaggccgggcgcgccgggattgctcacgcctgtaatcccaacactttgggaggccgaggtgggaggatcacttgagcccaggatttggagactagcctgggcaacatagcgagaccccttctctaaaaaagcaaacaggcaaaacttcatgagaatcttgatcatgttaaaattttatgtccttcgatttctccctacacacacacacacacacacacacacacacacacacacacacactcaacatttcctccacccatatcatcactccttagcatctttattccatcaaaactttctaccccttgacattctctgtgcagttttgaaaattaccctctcagcattctctgttcacccccacacctagaccctgacctctagtcaattctactacccaggggtgtccacggttccagcctcctccatgaagcccagttctatgggctcactcctctgggtaagtgggagcccccagctatcatcctcattgtatagaaaaccaactctgtgatgctacctgcccctcttccccttctctcctgaaagagggctggggtagaggtgggaggactggttatggccctggccgggtctgtattcgtactgggaggagtattggtactctgtgtagaaagaaatggggagggggaaatggggtggcctcagcatctccctaagtcccagcctttaagtcctcctgttgcagttcgtcgcctgcagcttcgagaggagttggatcgatcttcttgtggaaacgtcctcttcaatggttacctgccgccaccaggtaggcactcccaatggaatggaggggcgcggaggtgggccaaagactacatttcccataaggctgcagctctcgggtgcctgtgctgtgcgtcctgagatacagtgggaggtgtagttccctatcagatgcttgggctgatgcttggaaaggaagttggacacagcatttcccatgagacaatgggccagctaactcttgaggctcagaaggatgtcctggagccccatgggagttgtagtccgggtttggtttctttgtagggggggctttggaagacctgggattcttcgtatggaggggagaaatattaataggaagttattgacagtaatgcccatgatagccagcccactggccatggaaggtatgccccagtggttattggaactaggcttttctgattggtagaagtaacagagtagggaaatttcatctacagctttatttccctaactgcagtcagcacctgctaccttcatgaaagttgccagatataaagatctgtagtagtacttttccaacttagttttatcctgttttccgaaaaacaatcatttatttatttatttatttatttaattttatgagacagggtctggctttgtcacccaggctggagtgcagtggtgcgatcttggctcactgcaacctctgcctctcagattcaagccatccttccacctcagctctgccactgagtagctgagactacaagcactcgccaccatgcccggctaattaaaaaaataataatcattttaaatgcaagctttatattataaatacaaagtaaacatgaaaataaaacccaaacatagcagtgttattaaactctggcctgtagcagtggctcacacctgtaatcctagcagtttggaggccgagacaggtggattacttgagacctggagtttgagaccagcccaggtgacacagcaagacctcatctctactaaaaataaaaaaaaattagccaggtgtggtggtatgcacctgtggtcccagctacttaggatgctggagtgcgaggatcgcttgagcccaggaggtcaaggctgcagtgaactatgatcactcattacaccccagcctgggtgacagagcgagatgctgtctcaaaacaaaacaaaacgaaaaacaactctggctagatgctattgcttgccaagggtgcagtcttccatttattaaaagtgaaaattagggccaggcacattggctcatgcctgtaatcccagcactttgggaggctgaggtgggtggatcacctgaggtcaggagttcgagaccagcctggccaacatggtgaaaccttatctctgccaaaaatataaaagattagccatgtgtcgtggtgggtgcttgtaatctcagctacttgggaggctgaggcaggagaatcacttgaacccaggaggcagaggttgcagtgagccaagattgtgccattgcactccagcctgtgcaacgagcgaaactccaactcaaaaaaaaaaaaaaaaaaaaaaacggaaaattaggtaatactgcagattcattaatatcacagcagcactaaactcagtcttcctctgtgctgggctcaagggaactgaaagggaagtaacttgctatgtggttcagtgtcatttcatgctgtgtcactgcaccacttaaaatcttcacccggagactatgtcccacacatggggaaatcaatcaccgtcatattttaagtgcttgctgtgtgacagccacgattacaatgactgttactctacctcttattctcactgtagtgttcccagtgaagcggcggaaccggcacagcctagtggggcctcagcagctaggaggacggccagcccctgtccgacggagcaacacgatgccccccaaccttggcaatgcagggctgctgggccgaatgctggatgagaaaacccctccctcaccctcaggtacgtttctatctcgtggaaggttggggcagctgtggggtccctgtgaccctcttctgatccctactcttcccctcaaggacaacctgaggagccggggatggtgcgcctggtgtgtggacaccataattggatcgctgtggcctatacccagtttctagtctgctacaggtgcttggggagggagtggcaggaggtcccagccctgttgatgggaagggcatgcggtgagggttggtgatgtcccctcgatcctacaggttgaaggaagcctctggctggcagctggtgttttccagcccccgcctggactggcccatcgaacgactggcgctcacagcccgggtgcatggtggggctttgggtgaacatgacaagatggtggcagcagccaccggcagcgagatcctgctatgggctctgcaggcggaaggcggtggctccgagataggtatgaccccaagccttttccagaaccctctgtcctttaaattctactgcctgttaaaatgacccaccccataaaatcctcaaacccataagaattctctgctctattagatctgtttgtgtcattagaatgctccagcccttcagaattctgtatcctgttagaattccctggcttcctagaaaaatccacccacatacaattctccctccatcagaattccctgccctgttagatctcttggttttgttagaatgcgctattctgtgtggccatgagaaatgtctgacttggcccggtgcggtggctcatgcttgtaatcccagcactttgggaggctgaggcgggcagatcacttgaggtcaggagttcgagacccccttggccaacagggtgaaacccagtctttatttcaaaaatacaaaaaaattagctgggtgtggtggcacgtgcctgtaatcccagctactcaggaggttaaggcaggagaatcactggaacctgggaggcagatgttgcagtgagctgagatcgcaccactgcattccagcctgagcgacagagtggacagagtgagacaccatctcaaaaaaaaaaaaaaaacaaaaaaagaaatctctgacttatggctgggcacagtaactcacatctgtagttccagcactttgggaggccatggcaggaggattgcttgaggccaggagttcgaggctgccgtgagctatgtaagccatgattgcaccactgcactccagcctggacaacagagcaagaccctgtctcaaagccacagcaacaaatctcggacttattaatctgtccccaaataaatctcagccctcgtaagaatcccctgccaccagtggaggtttttttgccttattgcaaatctcagtgctgttagaattccagaccgttttagaatcccataccccatcagaaatcttctggcccattttatcttctctaattcctgctggaatcttcactttttttttttttgaaatggagtcattctctgttgcccagattggagtacagtggtatgatctcggctcactgcaacctctgcctcctggggtcacgcaattctccttcctcaacctcccaagtagctggggctacagttgtgtgctaccacactcagctaatttttatattttttagtagagatggagtttcatcatgttggccaggctggtctcaaactcctggcctcaaatgatccgcccacctgagcctctcaaagtgttgggattacaggtgtgagccactgtgcccagcccctgatggaatcttctatccttcaaggattctgtggtcccactgaaccctctggtccttggagttcttcctcccacctctcctcctccatgaggcagggttccagctgagccctttttgcccactgcaggggtctttcatctgggggtgcctgtggaggccttgttcttcgtcgggaaccagctcattgctacaagccacacagggcgcatcggggtgtggaatgccgtcaccaagcactggcaggtcagagttctggccagcctggctgcccccttcccagttttccagactgtacagacccaggaaggggttcacgtctgcccccacccccaccccctaagcctggaggaagccagagaaccagcagctggccagagcctggggatgtctgtgataaaggcctaaggagcaccagggaagccttcctggaggaggtgctgcagagcccacatgaagcatgaatgggtttgaaaaggagtagggaggattgtcttgggactgggtgagagagcaggttaggggggatgctgtagaagacaagaactggcttggctcggtggctcacacttgtaatcccagcactttgggaggctgaggtgggaggatggctttgggagaaagacagacagaggcagagaaagagacagagaggcagaaaaccaggcaaatagaaatagaaaatcagaaagaggtgacagagaagggtagacagagtcaaaccagactgaaccactgtggcagatgggggaactcagagagataaatggagatgaattagagtcatgtcagaagtacatagtggaggccgggtgcagtgactcccgcccgtaatcccagcactttgggaggccgaggcaagaggatggcttgagcccaggagtttgacgccagcctgggaaacataataagactctgtctctacaaaaaatttaaaaaattaaaactttaaaaagtacagagtccaggagaggccaagagtcagacagacagatgcatcaaagggaggaagggagggaacaagacagggacaaaggcaggcctggggtggacggggctggggagcagtgggtgggttctggaggtggaggagagggcccatcctctgtgaggggtcaccacggaaggaaaggaatggaagggctcccggctgcagcctgtcctgccccacccccaggtccaggaggtgcagcccatcaccagttatgacgcggcaggctccttcctcctcctgggctgcaacaacggctccatttactacgtgggtgagcagcagcctgtgtcccgggtgcccgagaccctcccctgggagaggggaagggagggagagaggctggggcacttggaacaaacccgctccaccctccctgcccaccccagatgtgcagaagttccccttgcgcatgaaagacaacgacctccttgtcagcgagctctatcgggacccagcggaggatggggtcaccgccctcagtgtctacctcacccccaagaccagtaagctatgacccggcttcccctgctgctgtcacctgccagccccagccccagcctgcagctgtcccccaacttgtgtagcatgacccagaggggtttatcgaggggcggcagattcaactctctctcatttttttttctgagacagactctcattctgttgcccaggctggagtgcagtggtgcaatcttggctcactgcaacctccacctcctgagttcaagcgattctcctgcctcagcctcccaagtagctaggattacaggcgcccactgccacgcctggctaatttttgtagttttagtagagatggggtttcaccatgttggccaggctggtcttgaactcctgacctcagatgatcctcccgcctcagccccccaaagtactgggattacagacgtgagccaccgcgcccagccagattcaactctcatccagtcattcaacaaatatttactgagtatccctgtatataagcacgttctaggtgctagatggtggccaccctctccactaggggcagaatggaccattaggagttaatctttgtgtttctttcccacctttgtgattaaggcatgatgttcacatgttcataaaacaacacagatgcaggttttacagcagatgaacctgagttctcttacttgagacagttttttgttttgttttcttgacatcaaatgcagaatgggttaatttttgagacgtaattctcataccataaaatttcccatttgaacgtgcacaattcagcggattttagtatattcacaaggttgtacaactatcaccatgaacaaattccagagtatgttcatcacccccgtaagaaaccccctgatctttagcagtaactccacatttctcacttctgataccctctagaaatcactaatatgctttctctttttgtttgagacaaggtctcgctctgctgcccaggctggagtgcagtggcatgatctcagctcactgcaatctctgcctcttgggttcaagcgattctcatgcctcagcttcctgagtaggggaggattacaggtgtgcatcaccatgcctggctaatttttctactttaagtagagactgggttacgccacgttggccaggctcaatatgcttcctatacctatggatttgcctgttctggacaattcctgtaaatgggatcatacattatatggtcttttgtgtctgcatttttcacttagcatatttttttaaatggttagtgttttctgggtcttaagatatccttacctattctaggttacaaagatcttctcctgaatttcttctagaagatttacagtttagtttttacatggaagtctgttctatcagaaattaaattttatgtatggtgtgaagcagggattattcttttttaaaaaaaaatagagacagggtcttgctctgttgcccaggctagagtgcagtggcatgatgtgagttctctgccacctccgccactcgggctcaagcgattcttctacctcaacctcctgaacagcagaaccacaggcatgcatcaccacacctgtctaatttttgtatttttttgtagagacagggttttgccatgttgcccaggctactcttgaactcctgggctcaagtgatcctcacactttggcctccaaagtgctggaaatacagacttgagtcactgtgcttggccatagctgctgctgctgcttttcttttttttttaaagcagaaataagttaataatacacctaacttcatgacacattatcacctttcttctttgtaaggcccttttcttatttcttttttttctttctttctttttttttttttttgtcttttcctgagacagagtatcgctctgtcattcaacccaggctggagtgcaatggcgcaatctcagctcactacaacctctgcctcctgggttcaagcaattctccagactcagcctcccaagtagctgggattacgggtgcctgccaccatgcccagctaatttttgtgtttttagtagaggcagggttttgccacgttggctaagcaagttttgaactcctgggattctcctctcgtcgtctcccaaagtgctggaattacaggcatgggctgctgcacccggcctctttcttatttcacttacttactcatttcctcctcatctcccttcccgccacatgccactattatgtcatttttctttgttttttgagacagtctcgcttcgtcacctaggctggagtgcagtggcgcaatcatagctcactgcagcctcaccccctgggctcaagtgatcctcctacttcagcctcttgagtagctgggatcataggtgaatgccatcacacccaactagttttttaaaaatcttttgtagagatgagggtctcactatgttgcccaggctggcctcaaacgcctggcctcaagcaatcttcctgcctcggcctctgttctctgttttactttctctttcctctcttatttgctgtttcactgttacaatttctgtctctgggcctctcctcctttgacctgtgcctttgtctccctgttcctccatttcccacatctcatcaccatctttttgtgtccttccctctctccttgctttctgactgtgtctctgttctgtgtctctttctttctttctttctttttttttttttgagacagagtcacattctgtcatgcaggctggagtgcagtggcgtggtcttggctcattgcaacctctgcctcctgggttcaagcaattctcatgcctcagccttctgagtagctgggattacaggtgcgtactaccaccaccagctaatttttgtatttttactagagacagggtttcagcacgttggccaggctggtcttgaacgcctgacctcaagcgatccacccgcctcagcttcccaaagtgatgggattacggcgtgagccaccgtgcccggcctctccttgctttctgactgtgtctctgttctgtgcctgtttctttctccctgccctggtttctgtctctgtggcccaggccctctcctcatccttggcccctcaccaggtgacagtgggaactggatcgagatcgcctatggcaccagctcagggggcgtgcgggtcatcgtgcagcacccggagactgtgggctcggggcctcagctcttccagaccttcactgtgcaccgcagccctgtcaccaagatcatgctgtcggagaagcacctcatctcaggtgagcctctgtggggtgctccagtgctgggagagacagctcagatgggagtgtggagacaggaggatgagaatttccactggggagggacattgtgtaggaagagagctctggcggagaggattgacctgggatgggactgtaattgcagaagtgagagaataccataggggatcagtctggggaagagtgaatctgtgtgtgtttgggaatccatcaattcagcaacgatttacggggcacccaccatgtgccaggcataggggatacagtgatgaacaagacaggccaagtccctgccctcgtggagctgacattctagcagcgatggcagacaataaatctataaaaatggacatcaatggccagctgcggtggctcacacctataatcccagaactttgggaggccaaggcgggtagattacttgaggtcaggagttcgagaccagcctggccaacatggtgaaaccccacctctaccaaaaatataaaaaattagccaggtgtggtggcacgtgcctgtaatccccgctactcgggaggccgagggaggagaattgcttgaacctgggaggcggagattgcagagagcccagatcatgctactgcactccagcctaggcaacagagcgagactccatctcaaaaataaatagataaaaatgcaaatcaggctgggcactgtggctcatgcctataatcccagcactttgggaggccaaggtgggaggattgcttgaggctaggagtgtgagaccaacctggacaacaaagtgagacattgtttctacaaaaaatttttaaaaaattagccaagtatggtggcatgcacctggggtcccagcttcttgggaggctgaggtggagggatcacttgagcccaagagtcaggggctgcaatcagctatgattgcacccctgcactccagcccaggcaacaaagcaagactctatctcataaaatattaataaaataatctaaatcaacaccaggcaatgataagggctatgaataaacatgaagctgtgtgtggctagagagtgtcaagtcgctggagaggggtcattcagggaaggcctgaggaaggacctttgagcagaaataacagaatgagcagtgcagattggtagggacaagcattcaggccgagggaacaggcattgcaaaggctctgaggtgagaggatgcctgaggaagtgcagggagccacttgtgcctggaacagagtaaatgagggggagaatgggaggagatgagggtatggaggtgacaagggcaggagccacagagggctccgagcaggggagggacatgactagcttcaggtgttcacaggctccacctggctgcccgtgggagcacactactgggataggacaggagcagggacctctgggaggggcgtgctgatacggtccaggcaggtgacgaaatggaccaggaccggtgtggggcagaggatagggcaaggtgagatcaggctctggaacagttttggaggcagaggcaacagggtttttaacatttggaattctggggaggaaaggattctctgaaagggaagaactcagcaagggctgaccctcctgaaacggggctgtcctgaggctctggacgggcaggcagcattgatgcctgcaccaggcctgacttcctgctctccttgtgcccctcagtctgtgccgacaacaaccacgtgcggacatggtctgtgactcgcttccgcggcatgatttccacccagcccggctccaccccactcgcttcctttaagatcctggctctggagtcggcagatgggcatggcggctgcagtgctggcaatgacattggtgcctactggctcctggccttcccaccccactgacccccttacctgacccctgttgacctccgctgattcccacttgcggccacctgacccaggagcctgcaacgattggggtgtcctgatccttgaggcacctgagctccactgactgccacaaccccccagccctctctggccctgcccaactctaacaacctggggatgggactggggtcttggggtggtgggtttcatcagtggggaaggaagtctgaggctgagggaatcccagctggccctgacccctgcccctgcctggcccaggcccctacggtgagcgggacgaccagcaagtgttcatccagaaggtggtgcccagtgccagccagctcttcgtgcgtctctcatctactgggcagcggtgaggacagtcctgtccaacagggagggaggacagtcctgtccaacagggagggaggtcaggggagaaggcaagatgctagccagatcactgaggccagaaaggggtcccagccaaggagcattgaaggagcaaaggctgggagggaggacaggcctggtaggtttgtcttctggtatcaaaggtgtgacaggtgttggtgggactgacctggcgcagtgccagcccagtgcaggcagggccaggttgaaggcacagggggtggggtcagggtgggatggggggcccaggcggagggggaggggtgggatgggggcccagggggagaggtcggggtgggatggggggaccagggggaggggttggggtgggatagggggaccaggggcaggggtcgggatgggatggaggagacccagggagctgtaggagccttgcttcagctgggaaaggggcctcggaggatgttctggatgaagggactctgagcagagacctagaggacaagtaggaaggagcagaagaaagaaggcaggggaagggggccccagcctgagggaactgtatgtgcagaggctgagaagggccaaatagggtcacatgggaaggacacgtgggctcctgggctggagcacagaacaggaggtgaggatggggtgcagatgcgggcgggccttgtcaggctgtggaagggctgaggctttgtcctgtgcggggagccgtggccactgcatgggggatgaaaggaggcttgatgggaggccaggagcccagggaggaggccaggaggctgataggaggtgggggagcagctgggacgggcctcaggtcttccctgcagtgggagcagggaagagcagaagctctgggagactccctgggtgtttggggctgcggtgtccaagagctgctggacccttgggactggaactcaaaagcaggctagggatggataaagattgggatggcccctggagaggcaggaactgcagccacagtggtggggactgggacgaggaagggtgagaaagcgagggtgaccacctcccccactgcaccccccagggtgtgctccgtgcgctccgtggacggctcacccacgacagccttcacagtgctggagtgcgagggctcccggcggctcggctctcggccccggcgctacctgctcactggccaggccaacggcagcttggccatgtgggacctaaccaccgccatggacggcctcggccaggcccctggtactccctgccccaccccaatcccgtcccaagccccacagcctcacccagaaccactctccactgccaactgcttgatctctctcccaggcccttgccctctgaccccttttcctttgaccccctctctgctccccatcccttcctgcccttgtttttcaacccctgtctcagcctctggcccccatgcattgatctctgcttcctctctcctgtcctgaccctcggtgcttgcactgcaatgcaacccaggcccttgccctatgacccctgtcttgccccctgaccctgcttccgtgccccccagcaggtggcctgacggagcaagagctgatggaacagctggaacactgtgagctggccccgccggctccttcagctccctcatggggctgtctccccagcccctcaccccgcatctccctcaccaggtagccacaactccactgccccttctgtgcaatgaggggagaggggacagcatggtgttcccggggacagagtggcccagctgccccgtgatgacgtgcacttactgtccttacttcctcagcctccactcagcctccagcaacacctccttgtctggccaccgtgggagcccaagccccccgcaggctgaggcccggcgccgtggtgggggcagctttgtggaacgctgccaggaactggtgcggagtgggccagacctccgacggccacccacaccagccccgtggccctccagcggtctcggcactcccctcacacctcccaagatgaagctcaatgaaacttccttttgaacaacgcagctgccatgatgccttgggatgccctggtcctgggggactcaggtgcctccctgattcctgtgggaaccccgggttcagggccagggcctccttggaataaatggttattgttactaggtccccaccttccctcttttctggaagccaaagtcaccctccccaataaagtcctcactgccaacatcttgcttattcttagcaggtttgggactccccaggaaaggggtggggaagatgtgggacccaacccgatatatgcaaaatcaggaacatctacctctcttgtttaagcaaagggaggccaggcatggtggctcacatctataatcctggcactttgggaggccagtttgcttgtgctcagaagtttcagactagcctgggcaacataacaaaaccccatctctacaaaaaaatacaaaaattaagcaggcatggtggtgcatgcctgtggtcccagcttcttgggaggctgaggtgggaggatcgcttgagcctaggaggccaaggctacagtgagccatgatcacaccactgcactccagcctgagtgacagagtgagatcctgtctcaaaaacaaaacaaaacaaaaaaggtgttgcaggggaggaatgtgttggcttttactctgccttcaggcatggctggatccggggcttcaaacactaattcagaatatctttttttcttttttcttttcttttttaaagtctcactctgtcatccaggctggagtgtagtggtatgatctcagctcactgcaacctccacctcccgggttcaagcaatcgcaatcctcctgcatcagcctcccgagtagctgggattacaggtgtgcaccaccatgcccagctaatttttttatttttagtagagacagagtttcaccatattggccaggctggtctcgaactcctgacctcaggtgatctgcccacctcagcctcccaaagtgctgggattacaggcgagagccactgtgtccggcccagaatatctttttatctcctaacttcacttacctctggaatacatcttcaatcaggttttctctctgtggcaaggtgactctaagcagctgcttagcaactctttcttccctagcaacagcaaaaatcacaagactgattttcattggcttgaattaagtcaggtggccattcctgaaccaattactgtggccagtgtgatgaaggccttccattattgcagcctggatcatgtgtcctgctgtatttttagtagaggcagggtttcaccatgttggccaggctggtctcaaactcctgacctcagatgatccacctaactcggcctcccagagtgctgggattacaggcgtgagccacctttcctggctggccttgggattttttttccccaaataatgcccgttcctacggcacttccttgaggagattttctgcatcttttttccttgtgccaataaaaaagggacagaaagtggggacagactaggagtagagaatactagaacatgctaattctagaattccatagtttctggaatgccagagcttctgaaacatagtagagaggggtctcgaacattaggacatctcggacacaaggatattctggagtgctcatggattaacaatattagagttctcccctgcttatcagagaatccagaatatagaagtttctgacaaaaaggacctgaaaaatcactgattctagaataggggagtgtcaaggggagttcatacccatgaatctccaccggtaggaatatcttgcatgccaggatgtctggaatgctgagaattataggatacagaaaggaacctggattactaggaaatctagagaatgggagagatcctggactatccgcccttccagagcactggaaggtttgtttgcgttccaagaaatccataatggcaggagattccggattatcagagaatctggaacacaaatgggagacgtaaaaggtgagtgcctctgaaaccggggtgttctgaaatagctgtgcacctcaaaccctaattttgtttttgtttgtttgtttttgagacagggtcttgctttgttgcccgggctagggtgcagtggtgcaatcatggctcactgcagcctcggccttctgggctcaagtgatcctcctgcctcagcctcctgagtatttgggactacaggtgtgtgccaccacagccagctactttttaagtttttttgtagagacattgtctcactatgttgcccaggctggtctcaaactcctgggctcaagccattctcctgccttagcctcccaaagtgctgggattacaggtgtgagctaccatgcccagcctcacactctagaaaattttttacatgccaggatattcagaatattgggggatattggcatgttaggaaatctagtatgtagggggagggcctggaaggtcaggaaatctagaatatggtggtgttttgtaatgctcacagatctagaatattagagtcatttttttttccaggccggagaatccagaacgctcgtgttgctgaaatgctggtcattctattcttatttcatgtttaaatttttattattttctttatttcttttttttgagacagggtctttctctgttgcccgggttggagtgcagtggtgtgatctcagctcacctcaacctctgcctcccgggttcaagtgatcctcccaccttagcctcttgagtagccgggattacaggcgtgcgccaccatgcctggataatttttgtattcttagtagagacagggtttcactgtgttggccaggctggcctgaaactcctgacctcaagtgatctgccctcccacctcggcctcccaaagtgctgggattacagacgtgagccggccttattctgggggagggggtggggggggagagagagagagggagagagagaggagaatttgggatgttagcaaatctagaacactgaagagctgggttttttaaatgctagagatagtattatcctagtatagtattaactctgtgtgtttttgtgcgtgagagggcatggggggaggggtggaagattctggaatgcggggggactagaactctgagggattctgaagggttgagatgagttaggattcaagaggtgacatagacacgatcctgggagatagtgacactgatgggagggatggggagctggggactccaaattctagggggaggggaggctaacgccggaagttgcagtggtgagccagaggatgttgcctagcaacaagcattgaagatgcgctggatcccggacagaagggagaaatttcagcagcgcccccagcaaatgctccagccacagggtaggaggtggtgaggggggaagcgggtagggatatgctgtcctgcagggtcatgtgagcaggggtcttgggggttatacaaaaacagggtcatggagtacagtcatggggcagagccgggctctgggacagcccacgaatagctgtgaatggagtgtgagtgccgtcgtcacctgccccagggactgtgtgtccctggacggtgctggacccagatttctgggtgtcagtgtgggatggaggcatggattgctgtaggtggcagtaatggtgtgtagccgtgtgagtcagcctgtgtgtctcacagtgagcgggggtgaagggcttccccgtcagtcctgcacaccctcctggattggaagaaggagcaggagtggggggtggggggtgcaactggatcagttgccattcttggtctggggtgggctctgtggtcacggcgtgtggcctagtaccctgtgtgggtggagcctgggatccacgaggtgggggcggggctaacgctacagaactgggaagcttaagaatccaactgctttgggatatggggcctggaaccccaaagcgaagcaaacatgaaaggggtgggcttgggatcctacatgtggtcacgtcccagttttctgtgggaaagggtgtggcctgaaactctggaaaaagaggtgattaggggcagagtgaagctctgagggtggtgccttagggagagaaggggcttgtatttcagagaatatagggtggagccttgaatttataatgatcttctcaaagaattgatcccttctcaaggccctaggcttcaggggttccaggctcaccatctgcaaaagcttgctccccgaagctctgtccctcagtgaacccagccaggctctgcccctgacccacaggatctgctcccagggggtcctgggggctcctggctctgccccctcctgcacctcacttattgccatccccagagggtatcagacccccttccttgcctgagtctttgaatgctcccaagagctttgagtctcaagctgggcttgagaccctgagtttgaaggcttgaagcctggaaccccggtgtggacggggtttaagggcccctgtggcttgcagctcctagtggtggagactcttaggcaaggaagggatcggtactctcttttatatagttttatgtatttatttattattgagatagggtctcactctatcgtccaggctggagtgcagtgcagtgcagtggtgccatctcaactcactgcagcctccacttaccaggctcaagtgatcctcctacctcatcctcccgagtagctgggactactggctcatgccaccatacccggctaatttttggatttttttttttttttttttttttttttttttttgagacagagtcttgctctgtcgcccaggctagagtgcagtggtgtgatcttggctcactgcaacctccacctcctgggttcaaacgattctcctgcctcagcctcccgagtcgctgggattacaggcgcccaccactgcacccagctaatttttgtattttttagtagagatggggtttcaccatcttggccaggctggtctcgaactcctgacctcatgatccacccgcctcggcctcccaaagtgctgggattacaggcatgagccaccgcgcccggcctaatttttggatttttaatagagatggggtcctatgttgtactatgttgctcaggctcacctcaaactcctggactcaagcgatccacctcggccttccaaagtgctgggattacaggcccgcgccagggcacctagccggaactgggaactctctaaggagaaagtctgcaattctgggtggtgggaggctgctcttgggagcattcaaagactcaggcaaggaagggggtctgataccctctgggggcggcgataagtggggtgcaggagggggcagagccaggagcaccctgggagcagagtttgtggatcaggggcagagcctggctgggttcactgagggacagagcttcggggagcaagcttttgcagatggtgagcctggaatccctgaagcccagggtcttgagaagagatcaattctttgagaagatccaatgtgaacttgggaccctcagaggggcaggacctgggggctggtgcagggttggtgctccatttgcagaatcctcagtctctctcgtggaaaggggtacccgtggggggcttccagcttctacgccagcgagggagctaaattctgaccgaattctcccagaactgggagcagagagctgaggactgccagatggagtccagcttaggggaccctgcccccaaccccgctcccgtatccctcccatttttaagcacccctacgcctgggacctctgttccacgagaaggttcacggagccagtatccgagtcctaatttccccccaccgcgtggggaactcgaggtcccccgcgcccctagtccggcacctgtccctgctgcctcctgattggccgcgcggcgagcgctggcggcgccgggctgtgattggcgggaagttcgcagcccgtggctggactgtggagaaagtgagtcggcctcgggcgggggcgggggcgggggcaggggcggggccggggctagcctgacccgctggacagaccgcccgcccggagcgggactcggcgcccgacacgatgccgaggcctggcaccagcggccgccgccccctcctgctggtgctgttgctgccgctcttcgcagccgccacctccgccgccagccccagccccagccccagccaggtcgtcgaggtcccgggggtccccagccgcccggccaggtaagccccctgcttccttgtgccccttccacccaataagtctggtggtccaggaggaccacggctttcggattcaggggaaactcgaacccactgcttcgatgtggagatgcaaagagggcccttggatttattaggcgccctcaatttgtaggggttagattcggggagtactgagatttttaggggaaagagtcccctttattgtggtggagaaggctaagtctccagagaatcctggggttagttcggggaaaggtctctagtttattggggcagggggtggggggctgagctctcctagaatgatagagacgtgtggggtcttcgagctaggatggagcgccccaagtttcttgggcgcgtaaggaggaaaggtgttgggggattctggagggactttatgaggccgctgagttgtcctggttttctaggatttgggggctctgtgttcatgaaaagcgacctttgggtttttcgaattggtcaggaagacatagactcttgcgttgatggtggaggggcttgtggggagtggggtcgggtgggggagtcctcaggcttcagaacggttggggatgctcaagtttcctagaattagaggactctgggattgaatgaggctccagtgatttcaccgcgagagatccaggattccctatagatctgggggctataggcgcccttcctgtctgcgggtgacgggactgaaggaagccgtctgcccagcacccccacccaccctccccgcctggcggcccagcgctccgttacaaaggccccgggctcctctcccgcctgggtctctgcgaatgcgtttagtaacccgagccgcggcgggggcggggccgggaaggggttaacctggagaaaaggcgggagggatgacggcaagatcggggatccccgaggctccccaccagatggcctcatcctccactcggccccacccacctgagaggggcccacgcgctggacacccccctctctgcacccccccactgctctcctctcggggtctgggcgcgcgccctcgtctctagacccccttagcctggggataatggacttgtctggggggccccttcattgcgacgcacttgaaccggagctggaagctccgccactgagaccctctgggctgggagatgtctgcaagaacggcacctttctcctggtcaggcgggaaactgaggcccaaagaccaagaaacgctggcttctggacacacatcgtggaagggcaagaacgggctagaactcaggctctgggattctcagtcctggactgtgactcccgttatccccctccacctcagcaccctgctggacccacagtcagagggaagagccttccctccccagctgccgaggcctgtgaaaatggcgccacctgtcggccaggctcaggatggcgtctgagtcccggaccgggatgtgcgggagggcggggttctagattcccagacagtgcgggcttagaaatgctcttagaaatcgagtcttttgtttttgtttttgttttttaatcacttttaaaaggctttaaaataacgtattttttcaataaaatcgtacgccaaaatctcttcataagacaaaagtacggtttctgtgcccttcagcccgaagtctaagccaatttgcctcccattgtacagatggagaaactgaggcgtggggagaagaacctcgttagtcatatacctgtttcaagccccctcaggatgcgtcttggtttcccctccccgattgccctcctttgcagagttctggggtgctaggggcctgagtgacttccactccactatttatagcgttgctgtttgtcgctgctgcccgggccagacgtctaggaggagccgctgcatccgaggtgggttctggaagatggagtatgagtagggggcaaaagggaataggaggagaggggcagggagctccccatccctcccctcatcccagtgggagagctggatgcatttggtagagaagtacttggtcccctccttccccacttagtccctggctgtctccgaagccttctgcagggtccgaagctgccagcccaaaaagtgtgcaggcccccagcggtgcctgaacccagtgcctgcagtgcccagtcccagccccagcgtgaggaagagacaggtgtccctcaactggcagccactgacgtgagtgggcagtccctcccctaccaaatcctccctcaggaactcctagctttgcccccgtttccgctcctcctcccttcccctctccctctctctcccccctccctccccggctctttcttttgctatcagcctgtctgtccgtttctatttcatcccttgcctgcctatctcaggctcttcccatctctgcattatttctgtctctttctgtttctttctagttacctgtctcttttcctctctctctttctccctgtgtctcactgcctgcctctatgtctaagtctctctgccccttctctctttctctcccccaacccccatcatctctctttctctcagggtctttgtttctctcccactagaggcctggtccccataaataggtgttgtggggggagggttgggcagagccgctactgaaagacattttcctggcatggaggccctttggtggggaggtcagtttaacccggtgacagcagcttttccgtcctctcccacccaggctccaggaggccagagctctactgaagcggcggcggccccgggggccagggggccggggactactgagaaggaggcccccacagcgtgcccccgctggcaaggccccgggtaagcacatccgcctttcctccgcctggggcgaggggggttccgggccagataaagccgtctggttcccacggtccagccgccgcctacccgccccccgttgtagctcagcacccacccccaggacgaggccccctctagggaccccagcgtccggccgtgcgaggtgagcccgggacaggaccagacacaggccagaggcactgacccgcgggggtggggccgggaagccaggcgtccgggctccccgcggccgaagagggagggcgctggcccgttagaaagctccgccgaaccagcccagacaacaaaagcgattgtgcgggttggcgcctgcctgggcaccaaatgctcaagattgtggggcggctgggggccaaaggcctcctcctgtttcccgaatcttccccctgccctcctcccgctccagctcttgacccctagtctagaacacccctcatctcaaacaccctcaaaaccctcctcttgctgtagccttcagcccagatgtgacccctccccctaaagtcttccagatgtgagcctcgggccagatgttagtacccccgcccacagcctccctttatccattgtgacttctcccgccaggtgtggcgttctggccagatgtggctacatcttcacatgtatcccccccacctccagcctcctgcccaggatctagacgcccaattcctttatgtgcccaggtgtagcgacccttctcccatccctcagatgtcccacctggctgtccagatgtaccatgatagccccctatcaagatgaagcccctttctctgtgccccgggcagaagaggatcaactcttagctgtctccccaaatgtggcccccactactcttaatggatttcctctttatggattcagctctgtctggggggaaacccgcccgcccccacctgttcccttccccgccgctcccctacaggcccggtccacttgttggtgcgcggatggggacagagggggcgccccgctcacccctgcgagtctagcgcccagcctgcgagcctctggctaagcgcccagccccacgcgcccccgcgcggccgccggggagggagtggtgaggagggggggcctgagcgggggcgcgggcgacctcccccgcgggcgggcgggcgggtgcggccgggcccctcgggcgggctggggcggcggcgcggcggagcgcggcgctgcagccatggcgggcggcgtgcggctgctctgggtgtcgctattggtgctgctggcgcagctagggccgcagcctggactgggccggctcggagagcgtctccgcgtgcgcttcaccccggtcgtgtgcggcctgcgctgcgtccatgggccgaccggctcccgctgtaccccgacctgcgcgccccgcaacgccaccagcgtggacagcggcgctcccggcggggcggccccggggggacccggcttccgcgcctgtgagtgcggggtggtggtcccgagagagcggctccgggggggaggaggatccctggggatggaggagacagtcctccagggagagggagcccagattccatatgcaatagtgcaagggaatatcaggggctatttgaggaagggggccccaaattcctggcttttggggttgggtcctgagggttccgattttgcaagcaatgagggttcttagaggcctgtgatgtcccacgtgagggaattggcgccagctttcatgctttgcgtcaaaatggggatctcagaattgaggggcctgagaacttttgggaggggggctcgaattctgagacgctgagtaaggagtccccggggaccaagcaagagtctcaggaccgcatgggggacgtctcagtttctgtgtgtttgggtgggaaggttctgtatgggaatgcctgtgaggtggggtactagagagaagaaagttaatccgaagaactaagagggagaggggacagagacgggggttgtgtgtgtgtgtgtgtgtgtgtgtgtgtgtgtgtgtggcggcgggggtggggtgggggtgtctccgcaggacctgagttgcaggggtcccacgtgcgacagaaatccagataagagggcttacggaaggggcgccccctgggggcggaggggacaggaggtgtatgcaccaggcactcctagagatggggagccttgggggttcaggtgaggtgggggagggcgcaccacctgttgttccaggatgcaaaagtgggcagactctctgggatcgggccttcctgccccctaccccgcagaccctatggagtggggagtgggggcccctggagcggagaactcgcccagcctggcccccagccagcccagcccggccggcgtgagctcatctcccgcctgagcccccgcccgctgccactccctctctcctccccttcctccctctttctttcactctttcccggcccagccccaacgtgcctgtgccaggcgccatgcccaggcgggtgccaagcccttgggggtgcaaggagtggcatgtgaagtgggggctgacctcaaagggacccctatgtcctcaactccccgcttggccagggctgtggggcatgacgttggctgtggccatctagtggcccaccctgggtgtaggcacccccagggagctggcctgcgggcctgcattcaggccaagagaaggcagagaaatgcctctggagcctgggaaataccctcagacctggctggtttcccaccccctccatcagagacccttaccattctgcaattttgattcctagttaagcctctcctaggccccactactcaattaaaagcccccattagaccaccctggagtcatggccccacactcctacctaagggagctgagtttttgctccaggccctagacccgctctccaaccatggcaacagactttagagaccactcctccagtgaaattccctctcattcttccctcccacctcccaaactgtgcctttccccagataactctgtagtattgtccagaagtcctgttcttctagctcacccccttccccaggaacttctgatcccatttatcttcagagaaccccagggttggtcttgataagtgggttctcgcaagaggactccagacattgtgctccttacaggcagccattaataaaaagcctttggcacttaatccttagctgggaggggaggggattccacagagggactcggccaattgagcctcttaagtgctgatgacttccaggaattccacttcactatctaaaccctgttttcagcaccgtcaaactggttgtctcctaggcggcactagagtcctgttttctaggtaactgtccacaaaaggactcctgctgaaaggacgcctcagtttcctctgagctaggttcctccatcccagaaacctccagccgtctttgaactcgagaggactgccctttagtcgatctcctcccaggactccagtccctttatccttctaaacggaggtggctctctgcgtcctttcctctctacagttgtggctcagaatcccacacgcgcctcccccggccgcctgcctcctccctcccctccgcacagctgtctccagctgttctctgcagccccgggagagagagggagggggtgccctcgcaggacagcccggcctcctttggctcaaaggtcccggggctccccaagggtccggaatgtggagcctccgccctgcccccgccgcacctctctctttgtttaccccgccgcacagctggcagtgccccgcccagaggtggcctggggcccagcgagggcgcgcagaggggagtggaggcgcgttcccgctcgtggctccgccccggtgctactggaggctgtaaggccgagctagaactctaaagccccagccagaaagaagttgggcggagacacagcgcggtgggcggaactagggcacccggacagcctggaggtggggtgggaggggcgtgaacaagtgagccgggcgaatcagagtgcggaaaggaaggtgggaggggctagaggcagcaggttaagctcctggataggcggggtttagaatcccgcgggtagaaggtaatgtgagaggggctacaaagggggcacagccagggggcggaggtaggacttcgtggaccaagcagagggagtgtgggcgggcatagaatgcgaaggagacagagttgggcggggagttatgccagggagtggttaaaatgtggtttgagtcaatggaagggatcagcattgggtcggaggggctggaacagcaaagggttccgtcggactacggaatgggcggggtcagcgccgtctgggctggtctggaactccgtggactcagccagaaattgggatccgagaggttgacatgaaagtgaataaacagcctgagggctggctgggctcacgcctgtaatcccagcactttgggagactgaggcagaaggattgcctgagcccaggagttcaagaccagcctggccaacatagtgagaccccgcctctaccaaatttttaaaaaacgtagcccgatgtggtgcacgcctgtcgtctcagctacttaggaggctcagatgggaggatcacttcagcttaggaggtcgaggctgcagagccataatcacgctactgcattccagcctgggcaatagagcgagatcctgccgacttagtgggtgggaccgtacctctgatggctgaacaactggactgggccaatgctgatgccagaattggggcggggccacatgacagctaagggcggagcgacttagaaatgaatgataccttgagggagtagggaccccaggagaacctgccaggaatggtggcgcccctgagtgtcctcgttctcctcccagtcctgtgtcccttgatctgtcacaatggcggtgtgtgcgtgaagcctgaccgctgcctctgtcccccggacttcgctggcaagttctgccagttgcactcctcgggcgcccggcccccggccccggctgtaccaggcctcacccgctccgtgtacactatgccactggccaaccaccgcgacgacgagcacggtgaggaaagggtggccagagtcccctccgacccctgtcaagcatttcactttgcccctgaccctcatatttcccgccttcccgagcacctttgcccagctcgccctccccgccttgtctagccccaccccgtaagaacccgtgtagacatccgtttgcccggccgtgcctcccctaggcgtggcatctatggtgagcgtccacgtggagcacccgcaggaggcgtcggtggtggtgcaccaggtggagcgtgtgtctggcccttgggaggaggcggacgctgaggcggtggcgcgggcggaagcggcggcgcgggcggaggcggcagcgccctacacggtgttggcacagagcgcgccgcgggaggacggctactcagatgcctcgggcttcggttactgctttcgggagctgcgcggaggcgaagtgagaggaggcccgtggggaggggcccggagcttgcctccgcgcgggggcgcgctcacccaacacttccccgcagtgcgcgtccccgctgcccgggctccggacgcaggaggtctgctgccgaggggccggcttggcctggggcgttcacgactgtcagctgtgctccgagcgcctgggtaagccccaggacgtccccgaagtgctcggagctggggagtggtgacaacctcaccgttcctcctactctgccctagataaacccagttcacaaattgtagccacgcctaccccattgtggaggcgacttccagtcctgagcttttcataccgctctgggaccacccaccccattttctgactttggccactctgttctcaccctgcctttgtgccttggccccccaccatatactttgggagtctccaatgttgccatttcaactgccaacctaaggctgtccctgcacttaaactacagccaacatcttttagtccctcccaccccgtcttcgtctctgcccactccattctcgctctgcccacctgtccctggcccacccctctcctctcgccacagggaactccgaaagagtgagcgccccagatggaccttgtccaaccggctttgaaagagttaatgggtcctgcgaaggtgcaacggggcaggggtgggaggggcttggttctgggggcgggatttgcagggatcaagttcctgactccacggtgacctccccaaccctggcagatgtggatgagtgcgcgactggcgggcgctgccagcacggcgagtgtgcaaacacgcgcggcgggtacacgtgtgtgtgccccgacggctttctgctcgactcgtcccgcagcagctgcatctgtgagcaaccagcagggagctgaggctgggtcccgccctccctgccctcagaagtcccagagcatcctggggcctttaattccctcggacccccccagactcccgggttcctctgtcagccttagagccccctcagaacttctcagattcttatacagcttcagcatccctggaccacctttagacctttcaagccttttggatccagatccctccagactcccagacttttttttttggagatggagtctcgctctgtcgcccaggctggagtgcagtggcgcgatctcggctcactgcaatctctgcctcctggtttcaagtgattctcctgcctcggcctcccgagtagctagaactacaggcgggcaccaccatgcccggctaaatttttttgtatttttggtagagacagggtttcgccacgttggccaggctggcctcaaacccctggcttcaagtgatctgcccacctcagcctcccaaagtgctgggattacaggcgtaagccactgcgcccagctctcccagactttctggaatccttctcagacccccaaatcctctcgtccccctcaacgactcgactatcttcagatcttgagatccttctcagagtctctcattcaccactgacaccccattgaggctccaagcccttctcagacctccagagcccactgctctccttcagaccctctcagacctctcccaaatgcccctcgcacccaccaaccccccacccccaaccccagaaccattcccctctctcccaaatccctcagtgctacagcattcccagccccgccctgaaggatttcctccctgctcctcgcagcccaacacgtgatctcagaggccaaagggccctgcttccgcgtgctccgcgacggcggctgttcgctgcccattctgcggaacatcactaaacagatctgctgctgcagccgcgtaggcaaggcctggggccggggctgccagctctgcccacccttcggctcaggtgagcccctgcggcagtgcctagccctacgcgcaacacatgtggcgctcattctacgccccaccctccaaccctgagttcactgccccaacctgactggctgggctccagccttggccacgcagcagcctctgagacccgcaggcctcagactggacagcatccatggctccacctccatctgtagccacagccacccctccattcgtagccacagctaccccggagctcccaagttagtttttgtctcctgagcgtcaacgcccagtcccaccctgtccctgaactttgaccaagtccttggcttctgagacactgccttcagcttagccccaccccaggcatgcccctccctgagacacctccctggcattctatcttctgcttaaaactaaatctcacaagggagctatttcctagcctccaactctgtccctgtagacccaaccggaccctgccctcaaccctgttcctaccaccatcccaaatgtgggaaaacgctcttggccccacctgtagcctctaagacattctactctttggccaggacaccaccccatcccagcctccagctcaaacccctgacactctccagccaagccctgcccctagccaaggccagagtctgggctggccatcgttttcttcccgctctcttgtcctctctctgtctctcttacctattcccagagggtttccgggagatctgcccggctggtcctggttaccactactcggcctccgacctccgctacaacaccagacccctgggccaggagccaccccgagtgtcactcagccagcctcgtaccctgccagccacctctcggccatctgcaggtgagctggctctggcagaagtgggtgccatcttcaaggggctgccccagccccatagtgaaaggaggcaagagaggatttgggctccactcgttgataccccttctttatcaggctttctgcccacccatcgcctggagccccggcctgaaccccggcccgatccccggcccggccctgagcttcccttgcccagcatccctgcctggactggtcctgagattcctgaatcaggtttgctagaaagaactgagggcattgggcctgcagcagtggctcacgcctgtaatcccagcattttgggaggctgaggagggtggatcaccaggtcaggagttcgagaccagcctggccaacatggcgaaaccctgtctctactaaaactacaaaaattaactgggcgtggtggcagatgcctgtaatcccagctacttgggaggctgaggcaggagaatcacttgaacccaggaggcagaggttgcagtgagctgagatcgtgccattgcactccagcttgagcgacactccatctcaaaaaaaaaaaaaaaaaaagaattcagggcattgatgggggtattacaggtgggattctggggtaaaagactccaaggtgaagattccaggttacagcaaataggaatggtatgggcagagataagcgtttgaagggttgggtggtagttagatcaggagctggagtcacagttgggctcttctgtgtcaatcgagcaagccatttaacctctgagactcagttttctcattggtaaaatggggatggttgttgagatgcctctgaagtgtctgacacctagtaagtgctcagataaatacttatggtagataattatttttcattatctaatattagataattatttctcaggtagggcactaagaatgtatctcaggcggagggttggagagcaaactattcaaagccagagaccttggggtggcatgatgaggggattcggccaaggatctgatgagaacgttccaggataaaaaagatggagatcagaagaagactgggcttgcttggggaggagacatccatgaaggtgttttatggatgtctccgggggtgggggttttactgggatgaaaggaacggaggattcagagatgggggaaccctggctgactggaccccccaggtccctcctccggcatgtgtcagcgcaacccccaggtctgcggcccaggacgctgcatttcccggcccagcggctacacctgcgcttgcgactctggcttccggctcagcccccagggcacccgatgcattggtgagcaagacggagggcgcggaaggaggcggggcggggggctttgcctggtcaccttgtcaccagccccctccgtgtcctcagatgtggacgaatgtcgccgcgtgcccccgccctgtgctcccgggcgctgcgagaactcaccaggcagcttccgctgcgtgtgcggcccgggcttccgagccggcccacgggctgcggaatgcctgggtgagaaatttgccccacccggctccaggcccaccccagggtctcgctcctgctctcactccagagcctctccagccctcccacgcttcccctctcgggtcccgccccaggactgctctgccctggcccttggccctgcccttccctgacccgcctccacccagctccagcctccctttgaccccacccctacccagctcccaaactgccagtttctatcggggcctggtcgcaactcgtattgctccgcccccacgcccaggccccgcccttattggccacgcccctccctgactaactccctcccccaggccccgccactgtcctgcaactgcggcaaccaatctcctgaccgcgaccccgattccaaccctgccacaccagagccctatccccaaactgctcctttcttctctagcccctaccccaccttcccttagcttggtccccaaagctctcctttctgcccttgcgctaccaaaccctgccctccacaattgcctctctcactgtgcccctctccggctgtcctggccgggtccccatcctggctctggcccaagcttggtcccgctcccgcttccctctacccctgcctccttgcgtcgcttctcccggggctgtctgccccagtcccagccgcctggtctgtgcctacagatgtggacgagtgccaccgcgtgccgccgccgtgtgacctcgggcgctgcgagaacacgccaggcagcttcctgtgcgtgtgccccgccgggtaccaggctgcaccgcacggagccagctgccagggtgagggcctgggaggggcagctgggaaggggtgtgagcggttgggtagagcgcagtgatgagggccagagagactgaacaatagggcaaagcgagttgatttggagacagaggccaggctctcgagcagacgtgtggcctgatggcagtagagagagacctgggatgcagaggccaagtgatgggaaacagaaaggctgagtcatgaaagatggagaagcagaatgaggagggatggagatgtcagtaatcgggtaaggggagcagagttatggaggaaaggggagaaggaggccttctcatggggactacagagacagaaccagccaggcagcttagtagggattggtggaggatgcagagtcagatgatggtgacaaggaggaatagagatggggtcacggggacagaatgttggagggtggaaagccaaagtgacagaggtcagggaggcagaggggaacaagtgaccccgggccccctgccctgtgcagatgtggatgaatgcacccagagcccaggcctgtgtggccgaggggcctgcaagaacctgcctggctctttccgctgtgtttgcccggctggcttccggggctcggcgtgtgaagaggatgtggatgagtgtgcccaggagccgccgccctgtgggcccggccgctgtgacaacacggcaggctcctttcactgtgcctgccctgctggcttccgctcccgagggcccggggccccctgccaaggtgagggtgctgagcccagccctactccatcactgtttgctgtggagactggagagagattattgaggggcagagaggcagagtgatggggctcagggatggagaacaggggctgagggatggggacctcactccagagtcttctctcctttcaacaaaataaggcagtcctccccacccctcctccctttttgaaagatactcttgtgcttatgggaaccctgaggagggggtcacctgaggcagggcaggcaacatggagttggtgccttagcccccaccttagtagctggagagaccattgaatggggacacgaggaaggtgtctgtcttcctgggaagagggagcagcctgaggcaagtccagaaggcaggctcaagactggaatgctggggtgggtggtgatggccatgggaatggattcaggccccttcctcagcctcattggtcccctctgccccagatgtggatgagtgtgcccgaagccccccaccctgcacctacggccggtgtgagaacacagaaggcagcttccagtgtgtctgccccatgggcttccaacccaacactgctggctccgagtgcgagggtgaggccggggagggagggaggagtgtggatgggtgaggggggagttggaccacttcttcaaggccaccctctcccctgccccccagatgtggatgagtgtgagaaccacctcgcatgccctgggcaggagtgtgtgaactcgcccggctccttccagtgcaggacctgtccttctggccaccacctgcaccgtggcagatgcactggtgagaccaggccctggctgtgaccttgggcctgcatcatgacccccgacccttgacccagatcacaactatgacctggccgtaacctcctgacctggacctcagtccctcagtccccagagcctgtgactcctgaccctgacctggaccacaactcttgaccctgaatgtgactcctgagacccaacttgacagtaacatttgaccctaaccatcacccttgatgatagtccctgcccataccctgatagcaattgtgaccctcatgactctggccctgaatgtgacctataactcctgaatttgactgtgacatttgaccctaatcataaccactaaccatagcactgaccataaccttgactgtgtgactcttggtcctatctctttcacagcccctgcctcttctcagaatcccttctctggaacctggttgggttcataatccctgaccctggcccctgacttgaggcagaattctggaccctgactataacttctgatcctaactggattcagattccagtcactaactctgacccatggctcagccgaatcccatccaatgatcctagtttataatacttgactggtcccttgccctagttgatttctgatccctgtctgatccctctcctgactccaaaatcctggcacaggtagttcctagaaacctagacccacaggacttgcaaccatggtccccggaacccgagaaccttggtcagccctacccacctctgccatagagccctcccccagcctccaactcatgagacttcccaccacctcccccagacaccctactccaaggggattggtcgggtgtgtcccgagactggaccctttctgaacacccccaccccccacagatgtggacgaatgcagttcgggtgcccctccctgtggtccccacggccactgcactaacaccgaaggctccttccgctgcagctgcgcgccaggctaccgggcgccgtcgggtcggcccgggccctgcgcaggtgagcagcatagggacccgccagagagtctgggagtagggcctgggttccagggcaaagccggctggaaaggtggaggcgggaccaaggcgctgtgggaggagcttagaaacctggcattggtgggggcggggttactgcgatgtgggcggagcttgtctgggaggccgggtcccgtgactccgcccaatctcccgcgtaccctagacgtgaacgagtgcctggagggcgatttctgcttccctcacggcgagtgcctcaacactgacggctcctttgcctgtacttgtgcccctggctaccgacccggaccccgcggagcctcttgcctcggttcgtacccgggctgatcctggccccggaaagggtgggcttagggcaggaaaaggcgggacggggagaagagggcgaaaaggggaaaacgagtttttagccggggtattccagcaggatcagggggcagctggtgggagtctcgaggcagtgagggggggcggggcgtggagatgaaagggccgagtctgggtatttggaccgtgattgtaaagaagctgttctaaacccgtcggggggcggtgtttgcagggagggaagtagcgtgaggcaggttggggaaggcgtgagaggcctaggagagccgaggggcggtggaggggtgtggcctagaatgttaggcggagcgggaggtgggccgggccttcggacgccctgtcccgcagacgttgacgagtgcagcgaggaggacctttgccagagcggcatctgtaccaacaccgacggctccttcgagtgcatctgtcctccgggacaccgcgctggcccggacctcgcctcctgcctcggtgagaggccccgccccggcctgatccctcctcccttcgactccccgactcgccgattggcctcccacctctgtctttcctcctccgcttctcccctccccttacctctttcccccgcctcctctcctagcctccccaactctcctctaccccaatcttctcctgccctctcctctgcttccccggcctcccccttctgactctcctctcccctctttgtatcccccatcttgcctccctgcttcccacatccgaccacccgacctctctcctcagacgtggacgaatgtcgcgagcgaggcccagccctgtgcgggtcgcagcgctgtgagaactctcccggctcctaccgctgtgtccgggactgcgatcctgggtaccacgcgggccccgagggcacctgtgacggtgagcctgcccccacccgccttcgctagcgcttgcaacgcggtgctggaggctgctcccttggggactgaggaggggcgccctgcttcccagacttaggcggagggaaagaacaccctctcaccgtatctctgtagtggaaataagccgccaccgtgtccatgtattttcttgtgtcaggatcacggccaagcctcccttccagccgcagtccattccccctctgcagctgaagcccggtccacattttaggctatgcccccagtaagacaccgccccaaaactgttaggccccgccccttccaatcggcctctggattaaaaccccctcttcaggccccttctcttcctaacagaagtttggacgtgccctttccgcgccctccaccagtcctacttccagccttccctccaaagaggcccaatcccggtggccctaggccccattctttcccaatgagaaattcccaaggtgaaattctcctagcattggcccccgcccgtttaagctctgcccttccttggtctctctagacagggctttccattcgctcggatggctccagtctctcgaacacttaggccctcccttcctatctttgctccgcccacagacccgccccttgccttttcttactttccaggccttccctcccgccccgctctttcacccctcccgggtcaggctccagcgaggcaggagggtggggctaatcttccatacagtatatatttttttgtgtcggcgggggggggggggcggtgatggtgtgtgagtccgcatcttgtggaacacatgaaacaaaacatctgtgggctgccgttgactctgctagacctctgactcatggaaatctagcttcataagatctcattcattaattccacaagaattcactaagcacctactctatgccagcgtctggaaaaggtaataagagcaacaggaaataagtcatataaaaacccctgccttcctggagttattgtggggtaataaatatgtaaataaattcaagatttatacagcaggccaggagctgtggctcatgcctgtaatcccagcactttgggaggccaaggcggatggatcacgaggtcaggagatcgagactagcctggccaacatggtgaaaccccgtctctactaaaaatacaaaaattagctgggcatggtggcatgcgcctgtagtcccagctactcaggagactgaggcaggatactcgcttgaacccgggaggcggaggtggcagttgagccgagatcgcgccactgcactgcagcctcggcgacagagtgagattgtctcaaaaaaaaaatttatacaacaaaaaactggggggcaccttactatatgttgggcactggagatgtagcaaggaacaaaatagacacaaatccctgctattgtagagtttgtattctagagaggcgacagttggcataccaataaatacatacgtataacatcaggtttaggaaggaaaacaaagcaagacaaatgggacagagatgacagagcagtggatggaggagtgctaggagggcttgacctagacaccagacagaagcgagggaggcagccatgcagagagctgaggggagactgttcctggcagagggaagagccagtgcaaaggctctgaggcaggaccatgcttttgagaaatggcagtgaggacttgagagttatcaactatgctaggtgtggtggcacaagcttgtaatcccagctactcaggaggctaaggtgggagaactgcctgaacccgggaggttgaagctccagtgagccatgatcctgtcactacactccagcctgagcaacagagcaagaccccatttaaaaaaaagaaaaaaaagctggatggggtggctcatgcctataatcccagcactttggaaggctgaggcagctagattgcctgaggtcagaagttcatcaccagcctggccaatatgatgaaaccccatctctactaaagaaaaaaaaaaaagatagtggctgggcgtggtggctcacacctgtaatcctaggacttgaggaggccgaggtggacagatcgcttgaggtcaggagttcgagaccattctggtcaacatggtgaaatctcatctctactaaaaatacaaaaattagctaggcatgatggtgcatgcctgtagtcccagctgctctagaagctgaggtagaattgcttgaacctaggaggcaaaagttgcagtgagctgagattgagccactgcactccagcctgagtgaaagagcgagactccgtctcaaagaaaaaacaaagttttcaacattgttgatcttcagaagctcaggctcctagaataccagattgctaaagacttcttagtcttgggcaccggaagtggtgttagaacttctgaattcaggcctttgactcccctttcatctcctccacactctgcagatgtggatgagtgccaagaatatggtcccgagatttgtggagcccagcgttgtgagaacacccctggctcctaccgctgcacaccagcctgtgaccctggctatcagcccacgccagggggcggatgccagggtgggtgtccatcaggcatcgggtgagatgtggagatggtagaaggtccagaaatggcctgactgtctggtggttgcagatgtggacgaatgccggaaccggtccttctgcggtgcccacgccgtgtgccagaacctgcccggctccttccagtgcctctgtgaccagggttacgagggggcacgggatgggcgtcactgcgtgggtacgggacttcaggaggtggatgggaccaaagggggtgggggaggttggtcaggccctgtccctccccatatatctgaacaaatgggaattttcgggttgtggaatttagactttggaatataagatcatcttcatgccaggcacggtggctcacgcctgtaatcccagtactttgggaggccgaggcgggcagatcacttgaagtcaggagtttgaaaccagcctggtcaacatggtgaaaccccgtctctactaaaaatacaaaaattagccggatctggtggcaaatgcctgtaatcccagctactcaggaagctgaggcacaagaattgcctgaacccaagaggtggaggttgcagtgagccaagattgtgcaattgcactccagcctgggtgacagagtgagaccctgtctcaaaaaaaaaaaaaaaaaaaaaaaaatcagaactgttgtagtggctggtgacagaaacctgacttaatcaggttttatttttgtgtgtgttcttttaaaaatgtataaagtataaatgtataaagtactaatcttaagtgttcataaacattaatctttcctaacattttatgaggaaaatttctaaacacaaagcaaattgagagaatcatagaatgaacacctacctactcatgatctagattatattatcattttattacacttgcttcctcacatatctatccattaatccatctaattttttggacagagttaaaagtaaattgcaggcaccagtctgcttccccataaattcttcaatatgcatatcactaaccagaattcaatatgtgtttaccaatgtattcttctcttctctcttttttttttttactttgaggtggggtcttgctctgttgcccaggctggagtgtggttgtttgatcatagcttactgcagcctctaactcctgggctcaagccatcctccctccagaactgagcttccgagtagctgctaccacaggcacacgcaaccacgcccagctaatgtttttaatttttgtagagatgagttttttttttttttttggagacagagttttgctctagttgtccaggctggagtgcaatggcatgatcttggctcactgcaacctccacctcccgggttcaagcaattctcctgcctcagcctcccaagtagctgagattacaggtgcccaccactatgcccagctaattttttgtactttgagtagagatggagttttgccatgttggccaggctggtcttgaactcctgaccttaggtgatccgcccaccgtggcctcctaaagtgctgggattataagcatgagccaccacgcctggcctgtagagatgagttattgctctgttgcccagactggtctcaaactcctggctttaagcaaccctccctccttggcctcccaaagcactgggattacaggcatgagccattgtaccctacagatattttcattcaacgttcaatttatatacagtgaaatgcagcaatcttaattatacattctgtaaattttcacaaatgcaaacacaacaggttttatttctttaaagggaattaaaactataaagtcttgggatatatttgaactccaggcataactggatccaggaattttaacaaggctatttctatcttctctgagttctgctttcttctattgcatgattttcaggcagattatttttcacaatgatgaaggtggccctagaacctctgggctaacatctccagtgggccacccgagagctaaaaagggaggtttttttttcaatatttctagcaaaagcgccaggcctggctttgattgacccagcatgatcactgcctatgtctgaaccagagaaatgccgtcatctgtttggtcattcctggaacttgtgcccacctctcagagtagatatagccctactcaaagaacaggattgaaaatagaggagcacagggttcccaagggaaattcaaggtttctcactagaagaaaaacagatgatgggatctgggccattaaatatacacattatatttgaaagctgagactttcggacctttggaatcatagaagcttataaccactgagtccctctcccctgttgtctcctgcttacagatgtgaacgagtgtgaaacactacagggtgtatgtggagctgccctgtgtgaaaatgtcgaaggctccttcctctgtgtctgccccaacagcccggaagagtttgaccccatgactggacgctgtgttcccccacgaacttctgctggtgagactgatgtgtctatttaactgatggcggctggccccatgggaaaatcacgtggtctaatcattcctgatgtggacagctaccatcagctaaatactgttgttttaaacatcaacaaaagacacataagttaacatgggtagtgagactgtgtcaggagaattagaccctggtcctgactctaccagattctttcattcaacaaatgttcacagggtgtgcactgtgttcaggccatcttctgggcactgagaacatagtagtgaccagaagggatcactgtctgtcctcaaggggctcacaagccaatggggcagacagagatatcaccagatagtgacaacccagagaaatcaacaagactgtgacggggaaagcccaggggggttttggaggaggcgcctggcccagcatgagaagaggattagggagttcttcctgtaggagacgacatctgaactgagagctgtgggatgaatagaaatgagccaggcccgatgagtgaggagggcattctgggcagaggacacagcaagggcaaaggcctggcaaagccagagagcatctggcatgtgagaagaactgaaacaggttcaacatggcatgatttagagagcaaaggaaggggtagggagagatggggccagggaaagagtcaggtgcccgatcacactgacttatcacagtaagagagcactgcggtaccgtggaaggggtttcggcgttttttttttgaaaattttttttaaatgttttttttttaagacagggtcgtactttcacccaggccggagtgcagtggcgtgatctcagctcactgcaacctccacctcctgtgctcaaggaatcctccaacctcagcctgctgagtaactgggactacaggcacatatcaccacaacagctaatttttgtattttttgtagagatgtggttttgtcatgttgcccaggctgcagtatttttttttttttaatttttaaatgttacatatttaggctaggattggtggctgaaggccataatcccagctctctgggaggccaaggcgggaggatcacctgaggtcaggagttcgagaccagcatggccaacatggcaaaaccctgtctctactaaaaatacaaaaattagctgggtgtagtggtgcacgcctgtaatcccagctattcgaaaggctgaggcaggaaaatcgcttgaatccaggaggcggaggttgtgggattgcaccactgcactccagcctgggtgagagaggaagactccgtcccaaaaaaaaaaaaaaaaaaaaagctatgtatttatttatttttaataatttccatctttactttagattcaggggatacatgtgcaggctttttacctgggtatatttcgtgatgctgagctttgggatacaaatgatcccgtcacccagatagtaagcacagtacccaacagccagtttttttttttctttgagacggagttttgctcttgttgcccaggctagagtgcagtggcgtgatctcagctcactgtaacctccacctccctggttcaagtgattctcctgcctcagcctcctgagtagctgggattacaggtgtccgccaccacgcccagctaattttttgtatttttagtacagacggggtttcatcatattggtcaggctggtctcgaactcctgacctcaggtcatccacctgcctcggcttcccaaagtgcagggattacaggcgtgagccaccatgctcggcccaacagccagtttttcaacccttgtacctctgtccctcccccatctagtggtccccagcaactattgtgggcatctttacatccatgagtacccactgtttagctctcacttgtaagtgagaacatgtggtatttggtcttctgtttctgcattaatttgcttaggataatggcctccagctgcatccatgttgctgctaaggacatgatttcattctttttcatggctgtgtagtattcatggaagggttctaagcaggaaagatagaatcagattttgaaacctccctctggccgccatgtgaaggtgattgaagcgggtgatatggaggctgggagctcagggaacaggctggggcaggggcctggacaggagagaacagggctggaccaaggcaggggctgtggaaggggaggagaaggtggtgggagaaaaacccaagaggccatgtggacaagctgtggatgtctgggtggggaagctgtgtccaagacaaggcataggttttttgtttgtttgttttgtgacagagtctcgctctgtcgcccaggctagaatgcagtggtgtgatctcggctcactgcaacttccgctcccgggttcaagcgattctcctgcctcagcctcccaagtagctgggattacaggcatgcgccaccacacccggctaattttttctatttttagtagagaccgggtttcaccatgttggtcaggctggtctcgaactcctgacctcaagtaatccaaccgcgtcggcctcctgaagtgctgggaggacaggcaggagccactgcacctggcgacaaattgtaggttttgagatgaagactcagccagtttgccacacactggataagagacccagagaggcatccaggaagccagggaagttccctcaccacccacccaagctgttagctgcagtgacgggaaagtgtgaggtggggaggcaagagatgcagaaatgacaggaggtgacagtgggagaaagagaaacagtgacagaggagcgtgagaggtgtggagtctggttctgccactgatggctgccaccctctgtttccctatctatgccagcctcagtttccccatctatgatagtggcggggctggggattcagcccacactgggctaaagctccttgtctccccaggcacgttcccaggctcgcagccccaggcacctgctagccccgttctgcccgccaggccacctccgccacccctgccccgccgacccagcacacctaggcagggccctgtggggagtgggcgccgggagtgctactttgacacagcggccccggatgcatgtgacaacatcctggctcggaatgtgacatggcaggagtgctgctgtactgtgggtgagggctggggcagcggctgccgcatccagcagtgcccgggcaccgagacaggtgggcatgggctgatggggacacagggctgagggcttgggtggaaatactgggtggggtgtgggcctgggacaggggacacttttggacagggccttgaggtactagtactgtcagggcaagggcgagctgccaggcaggtgggcatgggcagacataaggctgagaggtgggcactaacaggcacagggccagagggacttttgtgacaagtgggcacgagcaggtcagggctggggctggggctctggtgtcctggctcaggcttgtctctgtgtgtagctgagtaccagtcattgtgccctcacggccggggctacctggcgcccagtggagacctgagcctccggagaggtgaggccagcctttgaccctccaccccactcagctctgaggcccagcttcgtctcttcctgttttctttgcctctgtctctcaccctttctgtttctctgtatctgtctccccgaccccacccatactctgtctctttctttcttttctttcttttttttttttttcttaagatagagttttgttcttgtcgcccaggctggagagcaatggcgagatcttggctcactgcaacctttgtctcctgggttcaagcgattctcttgcctcagcctctggcgtagctggctacagacactagccactacgcctggctaatttttttgtatttttagtagagacagggtttcaccatgttggccagattggtctcgaactcctgacctcaagtgatccgcccaccttagcctcctgaagtgctgggatttcaggcatgagccaccgctcctggcctctccatctttctttccctgtctctacttcttggtctatcaccagctctgtctctgtcttcccacgtcatgccctcacacactccacccatccagcccgcccccatctctctctctgcttttcgcacagacgtggacgaatgtcagctcttccgagaccaggtgtgcaagagtggcgtgtgtgtgaacacggccccgggctactcatgctattgcagcaacggctactactaccacacacagcggctggagtgcatcggtacaagccccacctcccccaacccccggcaactctctccaacccctagccttgccagctcccctctggaatgtggccaccaccagcgggaagtctttcctggagtctagactccatccatcacactgccaatgtgctgggaagagaaatgggaaagggtggggagagttgaaggggatgcctcttaatcatcctctccctagacaatgacgagtgcgccgatgaggaaccggcctgtgagggcggccgctgtgtcaacactgtgggctcttatcactgtacctgcgagcccccactggtgctggatggctcgcagcgccgctgcgtctccaacgagagccagagcctcggtaaccccgcccacgccatccaggccctccttcccttggctcggcctcacacccgcacccgggccacacctttgcgacggccacgccctccgaaggccacgccccatgctcctggctcgaccacgccccactgagccctcactcagtctctgtcccactgtctgtctctctgaggcgagctggctaggtggttaaaggcaaaagttttagggcaacctttgcatgttgcctcttggactccaggtttctttctgcacactgggtgaatagcccctaccttatagggtggctgtgaggaattttatttaattttatttatttattttttgagacggagtttcgctcttgttgcccaggctagagcgcagtggcgccatctcagctcactgcaacctccacctccggggttcaaacgattctcctgcctcaggctcccgagtagctgggattacaggcatgtgctaccacgcccagctaattttgtatttttttctttagtagagacagggtttctccatgttggtcaggctggtctcgaactcccgacctcaggtgatccgcctgccttggcctcccaaagtgctaggattacaggtgtgagccaccacacctggctgatgaattttattttattttattttatttttaatttttaatttttagttttattatttattttttactaagtaccacatgagtgctgcctgttattatttatctgcatctctaggtctctgtctctttccagctgtttgtggatttctgtctttggggttttctctgaatttctgacaccctctggatctttgttttcaggtccctttctcctgcctctgtatctttgttttcctgttttgagtctttgactctttggatgtgtttctctctctctctttgggtcttttttctcccttttcgtttctgactattttcctatctctaggcccctaacaacttctgctgaagctctgtctcttgaacactctacttgtcgttgtttgttttcatttttgagacaagatctcgctctgtcatccaagctgaagtacagtggcacaatcacagctcactgcagcttccacctctcatgcccaaatgatcctcccacctcagacttgcagtagctgggagtccaggagcccgccaccaagcctggctaatttttgtatttatatatatatatatatatatatatatatatatatatatatatatatatatatatatatatatatttttttttttaaagatgggtttttgccatgttgcccaggctggtcttgaactcatgggctcaagcaacccccccacctcagcctcccaaagtgctgggattacaggctccaacacactctctctgtgcttcttgccacctctctttttgcccactgtcccaaccactcttctctcatttcctgtgccttcagcacttacccccatacagtgagatgtcagacaatgctcagagaagcaaagcaactgccccgaggccacacagccctccagaggccagacttgggtagacccctctcaggccctacctcccagtcattggacaccttcttctgccctctcctcctatatgacagtctccttgttcctcaatccagaaccctggagtgacctcagagaacttccagagttagatcacagctgatgagaaggatttgctgataggcagagggtgcctgggctgctcagcaggggaagggtccagcccctgggaggacctgagtgccaggcccactctgacacatgctgtctccacctacagatgacaatctgggagtgtgctggcaggaagtgggggctgacctcgtgtgcagccaccctcggctggaccgtcaggccacctacacagagtgctgctgcctgtatggagaggcctggggcatggactgcgccctctgccctgcgcaggactcaggtgctggcactggcctaggctgaactcagaggccttgccccatgggctccaaatctaggccctcagatccccagtcgcagaacccccagactctatccaaactctgtcccctagaccaacccctatgtcgcagcccatcccaaaatcttggtccccgattcacactccaaagacttccaagtctcagccacagacatcccaaggcctgacccagcagatcccatagtaccagacccacaggcccctgaggtctggtctctcatatgctcagctcctggtctctagaaccaccagacacagcctatgagatgtcctcccctaaatcctgggcccttagacctgaaatgccagttgctcagacctcaccatcctggccccagaccccctggtcacagccccacagacctccaagtcccattgccttagacaccctccaagtcccattgccttacacaccacatccgggtgcctaagaccccaacacacagccccagagattcccaagtcttggtttctacaacctctgagtccctcagtcctcagcccttaggaacccagttccaaagccccagtcctgggtcctcagacctccaggtcccagtgcctcagactgtctcccatgcatcctgccccctcaggtccccagcagcaatccctgggattccccagtcctggtccacagaacacccccatctaatttcttcaggtccctagtcctagctcccatgggtcgctccaattccagcctctcagaccctgattcttagcaggcttcattacccttgatctcagcacgtccgaatcccagtctcagccttcagattctcagcgctggctccagaaaccccggggccacccaggaccctccccatccagtcctctgcctcctctcccaaggggggtatgtgagtggtgggtgtgggggccagcaggggctgattgtttgccttggctcctgttcccagatgacttcgaggccctgtgcaatgtgctacgcccccccgcatatagccccccgcgaccaggtggctttggactcccctacgagtacggcccagacttaggtccaccttaccagggcctcccatatgggcctgagttgtacccaccacctgcgctaccctacgacccctacccaccgccacctgggcccttcgcccgccgggaggctccttatggggcaccccgcttcgacatgccagactttgaggacgatggtggcccctatggcgaatctgaggctcctgcgccacctggcccgggcacccgctggccctatcggtcccgggacacccgccgctccttcccagagcccgaggagcctcctgaaggtggaagctatgctggtgagcactgccagcgcatgatgagactgagatgaggggtgaggtgtgcacggagagaggagggagggaaacagaaggcgggaggagagacggaacacaggtgcaactggagagagccacagaaagggacagagaagtgtctatagcccggcaaagaaagagaaggtggcagagggaaagctggcgagagaatgaggtaagcttactggccccgcagcacccgccacagccctggagcgggatggacagtttacagcgagaaagatggagccaaggacgcgcacccaccgttgtgggtaaggggtgaaggcagggacctcaagtcatagggtccccgcatttcccacaggttccctggctgagccctacgaggagctggaggcggaggagtgcgggatcctggacggctgcaccaacggccgctgcgtgcgcgtccccgaaggcttcacctgccgttgcttcgacggctaccgcctggacatgacccgcatggcctgcgttggtgagggcgggcccggggccagcatgcgcagggagaggcgaggcttgtccagggagggtggaagccctgactagggggtgctggtcagggacgggaaaggacctcactacaggggacgggccagcgcaaaagggaggagtaattcttccacctgggtggggcttgactgaagaaggcggagtcagggtgccagcagggcagggcttaaccacggggctggagccgggccttgaagcaggatagaggaatagaatagtgctggtgtgacttgcagtgctaccttgggcagtctgcaggacctctttggagagcctcagtcttcccacctgtaaaatgggaatattaatcaagtctgcctaatttggatggcagtaaagccaagtgattaaaatcaagaacatagccgggcgcagtggctcacgcctgtaatcccagcactttgggaggccgaggcgggcggatcattaggtcaggagtttgagaccagcctggccaatatggtgaaaccccgtctctaaaaatacaaaattagccgggtgtggtggtgcatgcgtgtaatcccagctactcgggaggaacccaggaggcagaggttgtggtgagccaagatcgcgccattgcactccagcctgggcaataagagcaaaactccgtctcaaaaaacaaacaaaactcgaggaggtcacatagacctcagactcagtccagcaacttgctgtgtgacgctggacaggtcactgtcccttacctaatttttctgatatgaaaaatggctacagtcaaagatcccatttcatagaattgcgaatattattaacactgatttacaataacattgagagtcatgtgcaaatggaggcacatgcgtaaaacgaattacagtacctacctaataggggtattagaaggacaaagttaatacttgtaatgtgcttaaaacaatgcatgaacatttattgttgttgacaccatcatcagtatttttttcttcttttttttttcttttcttggcgacagagactcactctgtcgcccaggctggagtgcagtggcctgatctcggctcacagcaacctcctcctcccaggttcaagcgattctcctgcctcagcctctcgagtagctgggattacaggcgcccgccaccatgcctggctaatttttgtattcttagtagagacggggtctcaccatgttggccaggttcgtctcgaactccggcctcaagtgatccacccgcctcagcctcccaaagtgctgagattacaggcatgagccaccgcgcccggccattattattttcttaacaaaatcctagtgcggtatgggccaccatatccatcttacagaacacgaaactgaagcacagtgaggttaagccacctggccgggctcacacagttagcagatggcagaggccagattggactccaaactgctcagcatctgtgctcctctgttccaagaacttaaggggccaaggaggcgagcttctggggccccagccttcagcagcgatcgttgtctcccctccgcagacatcaacgagtgtgatgaggccgaggctgcctccccgctgtgcgtcaacgcgcgttgcctcaacacggatggctccttccgctgcatctgccgcccgggattcgcacccacgcaccagccgcaccactgtgcgcccgcacggccccgggcctgagccctggcacccgctggccgcccacccgcgcccgccactcggggcccctgccgcgcatcctgcagcccgcttatgcgtatgtgcacggggccgcccgcctggacctggagaagggacctacggacgcctggaagctgcgacgccctgcactgctcccgcctccaccagcgcctcccactgatgtcgtggtcccgggcctggcccaggggcccctttacatgccctctcccttttataaaattttccattaaaaaccacctattttctatcttttgcctcctcctgtctatttctccaagtctaccccagtttgtgctttgagtcactaaatgacattcccttcccttctgacccctagtttcgtctgtctctctgcctctcttggtctctgtcttccttctctctctgtctctgtcgttctatctcatctctgtctctttctgatttgttttctctgcctaacctctacatcctgtcttttcatttctgtttctgcatgcgtctttctcttttcccttctctttgtttggttctttcatctcgagagcaatcttgcctctggattttttttttttttttttttttttttttgagatggagtctcactctgtcacccaggctggagtgcactggcgccatctccatccactgcaacctctgcctcccggtttcaagcgattctcctgccttagcctcccaaggagccgggattacaggtgcacactacaacccaggctaatttttgtatttttagtagagacggagtttcgccatgttggccaggctggtctcaaactcctggcttcaggtgatccacccaccttggcctcccaaagtgctgggattacaggtgtgagccaccgcacccagcttttattttttagagatgaggtctccctatgttgcccagtctggtctcaaattcctgggctcaagtgatcctcccacctcggcctcccaaagtgctgagattatagatgtgagccaccgtgcttggcctagaagtcttaagctgtcctggaacaagtggggcaagagcagggagcaggagtccctggagggccaaacccagacctgacgctccagctaggagttggctgtggatggagtatggagcggcagtcctgacagctggaggcgggaatgagctctgtgtgtgatggtggagtgcccagcacggacctcctccatgtgccctgcctgcttactggccatgttcctagtccagactcctcctccctaaaaaacaagaacggcctagatcagcataaacttagggcaggagtaggggtcgggaatcgtgggtgatcaacttggcactgggccaagctgggaaaaaaaaaaaaaatgtacctcagccaggcgcgatggctcacacatgtaatcccagcgctttgggaggcccaggcaggcggatcacgaggtcaagagatcaagaccatcctggccaacatggtgaaacctggtctcaactaaaaatataaaaattagcccgccatggtggcatgcaactgtaatcccagctatttaggaggcggagataggagaatcacttaaacccaggaggcagaggttgcagtgagccgagatgacgccactgcactccagtctggcgacagagccagactgcatctcaaaaacaaaaacccacaaaactgtacctgtcattcttcacccacctgtcaattcttgtgtccccagggtttcaaactcatatgctgcaaagaccagaaccggaatgttagcaggaagcagggaaaattgaggcacacattaccttctgcctaaggcttggttagactaggaaggggaattttccccattgttaatacttttttttggcctggcggggtggctcacgattgtaatcccagcacttcgggaggccaaggcaggatgatcacttgagctcgggagtttgagaccagcctggcaacatagtgagaccccatctctacaaaaaagtagctgggtgcgatggtacatgcctgtagtcccaactacttgggaggctgaggtgggatgattgcttgagcccaggaggtcgagactgcagtgagctgtgatcgtgcctctgcattccagcctgggtgacaaaggcataccttgtctccaaaaaagttttttttaatgtatatttttaataactatctgatattgtttggctgtgtccccacccaaatctcatctcaaattgtaatcagaattgtaatccggggaaggacctggtgggaggtgattggatcatggggacagtttcccccatgctgttatcgtgatagtgagtgagttctcacaagatctgatggttttataaggggctcttctcccttggctcgctgtctctcctgccgccttgtgaagaaggtgactgcttcccctttgccttctgccatgattgtaagtttctgaggcctccctagccatgcagaactgtgaatcaagtaaacctctttcctttataaattacccagtcttgggtggtatctttatggcagagtaagaatggaccaatagggccgggcacggtggctcatgcctgcaatcccagcactttgggaggctgaaacaggtggatcacctgaggtctggagttcaagagcagcctggccaacatggtgaaaccccatctctactaaaaatacaaaaattagcagagcatggtggtggatgcctgtaatactacctactcgggaggctgaggcaggagaatcgcttgaacccaggagccggaggttgcagtgagctgagattgggccactgcactccagcctgggtgacagagcaagactctgtctcaaaaaaaccaaaaacaaacagaaaaagactaatatagtaccctatggggcctatttggcctatgaggctccagttttaatcctctaggcactgctgaaattgcataaattgtggattggaggctgcttcctgacctgatctccagcccacccgctgagtgtcaggaggggtcacatgcccagcagcctcctgtgctacatcggggaatcatactaagagcgcctaccctgcaggattggtggtggtggttaaatgaattgtcatatatgtgcttagaatgtcacctggtacagagcaagggctcagtcattgttggcataaccctgggcctcccaggatatgctgagccctgtggctgggcagatagtaaggtcttgttcttttctcttttcctttccttcttccttttcttttctttctttctttctttcttttttttttttgacatagggtcttgctctgttgcccaggttggagtgcagtggtgccaccatggctcactgcagcctcaacctcccaggctcaagtgatcctcccacctcagcctctcaattagctggaactgcaggcatgtgccaccatgctcagctaattttttaatttttattttttgtagagaggggaccttactgtgttgcacaagctgatctcaaactcctgggctaaagtgattctcctgcactttggcctgccaaagtgctgggattacatgtatgacccacggcacctggcctggctaggtctttttctttaccaattctccctcccagggtggaggaggaggccagaccccatccccttcaacaggacagtgagaaacacctaacacaaggccttggtggggaggagtgtcagacaaggagtggctcaaggctccacaaaggggtgacagttgcacaaaactgtctgtaccaaaaatcattgaattatacactacacatgggtgacttgtgtggtatgtgaatcataagtcaataaagcccttctttaaaaacgccgactctacaaagcgtttcagaaagttaccctccagctgatacagggaacccgacccaaccactaattcctcagtcattcattcaacaaatattttcctgctttgcaataagtgaattcgaggaacacaaactttaacccagccttggggggtggttagggagggctcctggaggaggagatgttggagctgagagttgattactgtagggaaatgagcaagatgaaaggggtggaggtgcctataatcccagctactccggaggctgaggcaggagaatctcttgaacccgggaggcagaggttgcagtgagccaggattgcaccgctgcactccagcctgggcaacagagtgagactctgtcagaaagaaagagagagagagagaggaaggaaggaaggaaagaaggaaggaaaagaaagaaagaaagaaagaaagaaagaaagaaagaaagaaagaaagaaagaaagagaaagaaagaaagaaagagagagaaaaagaaaagagaaagaggtggagaaccatgttccaggtggaggggacagcacttccgaaggcctagaagtaagagagcaagtgtctgttagatgtctttcctttggtatctaaggcctgtattggacaacaatggtgacaatcttggtgcctgagaaatcccaggcccttgccttcatgggggacaccgacacatcaccacacatgagagcctgtgctgtatgggggaggcacaggcaggggtcaggctgcggtgggggaagatcagagggcatgcatgcccagaggagacacttgatccagtctgagagatgatcagggaaggctttctggagaaagagacaaagctctgaacagtctctgtttgggcgtctagatccctttgagaatctgtcgaaagctcattcacagaagaaaaactcacacaaacaaaggttgcaggcaatttccaagtattctcatccttcctcggaatcttctgtgggtatcccattcccaccccgcccccacaaccaccttgctgcataaatgtcccaggaattgcgacagggctggccaacagtgctggaaaactgcaatcgaatttcagcatcctgggagtgggatctttcttctgagatctcgcccgccgccgggcctggagggtgtgccccatggatctaattgttatcctgcctgcatcccctgcactaacccccagacctggcgttggggcttctggcactggccgggaccgacgcgttctcctctggaatgttcagagggaggtagtccaggcggtcaccgcgctcgccagacaagcaacgcagcgccccccgatggccaccgcgcgccggcgcagcccaagccggctgcgccccctagtggccgatgctcgtaaagtcttcagcgagccccgagcttttgctagccagcccttggttttgcaggctggggtcatcgtcgttgtcatcgttggcatcatcatcatcatcatcatcatcatcatcatcatcaatagctagtaggcttggcgtggtggcccacacctgtaatcctagcactttgggaggccgaggcaggtggatcacttgaggccagaagttcgagaccagcctggccaacatggtgaaaccccgtctctacaaaacagtacaaaaaagcaaccgggtgtggtggtgggcacctgtaatcccagctactcgggaggctgaggcatgagaatagcttgaacctggaaggcggaggttacagtgaactgagatcgaaccactgcactccagcctgggcaacagagtgagactctgtctcaaaaaaaaaaaaaaaaaaaaagctatgatcatccaggcagtgattcatgcctgtaaccgcagggctttgggaggccaaggcaggaggatgtcatgaggccatgagttctagactaacctgggcgacagagcaagagctgtctctataaaacaaaacaaaatgctatagaccagacgcagtagctcacacctataatcccagtgctttgggaggccaaggcaggcggatcacctgaggtcaggagttcgagaccagcctggccaacatggtgaaaccccatctctacactttgaaaaccactactttaactgtctctcccacagggagagctgcctccttcactctcagctcatttggttcacatgttgaccctactggaagactccagacctggccagtgagagaatcccttcccttcagcctttgcaactggcttagggacaggtgtgtccctgaagctggactgatgagcattggctctggaactactgctgattgttgaagaaggggcttcctagacatactgtgctgaaagggcacaggcttggaacactgggttcttacatgggagaagagctggcctgaaaatgcagccaacacgaggggaagcagcgctgggagaggaacagagagactggtgcctggcgcacgtcatctgcacctctgtctcacccttctccagaacatttctttgcatcttacatcaaatttgtcagcaaattctgtcggctctagttagaaaaggtgtcccattctgtgttggaggaaaagcgatgctgtctatcaggacgttaccgggtcagttgacagaactggaatacgaacagtcgattagaaaaattcacatactaatattaaatttactgaagttgatcactatattgtggtcatgtaagagaatatccctattcttttgttttgctttgttctgtttttgagacggagtctcgctctgttgcccaggctggagtgcagtggtgcaatctcagctcctgcaacctcctcctcctgggttcaagcaattctcctgcctcagcctcccgagtagctgggactacaggtgtgtgccaccatgcccagctaattttcgtattaatatttccagtacagacggggtttcaccatgttggccagggttctcgaacttacggcctcaagtgatctgcccacctttgcttcccaaagtgctgggaccacaggtgtaagccacgtcgcctggccagaaatatccctattcttttcttttcttttcttttttgagatggagttttgctcttgttgcccaggctggagtgcaatggcgaaatctcggctcactgaagcctctgcctctggggttcgagaaattctcctgccttagcctcctgagtagctgggattacaggcacccaccaccacacccagctaattttttgtatttttagtagagacagagttttgccatgttagccaggctggtcttgaacttctgacctcaggtgatccgcccccctcggcctcccaaagtgttgggattacaggcatgagccaccgctcccggccaaatatcccaattcttaagaaatacatagggcggctgagcacattacctcatgcttgtaatctcagcactttgggacactgaggtgggacgatcccttgagcccaagagttcaagaccaacctgggcaacatggcaagaacccatctctcaaaaactttaaaaatgatccaggtgtggtggctgcagtgtcaaggctgcagtgagccaggatcatgccactgcactccagcctgggtgacagagtgagaccctgtctctacggaaaaaaagaaagaaaagaaaaagagatacattacagaagtttttgtttgtttgtttgtttgtttgtttgagacagtcttgctctgtcgcccaggctggagtgcagagtgcagttcagttcactgaaatcctggttcactgcaacctcacctcccgggttcaagtgattctcctgcctcagcctcctgagtagccaggactacaggtgtgtgccaccacacccaggtaatttttgtatttttagtagagacaaggtttcttcatcttggctgggctggtctcgaacttctgacctcagatgattcgcctgccttggccttccgaagttctgagattataggcatgagccaccgtgcccagcccattatagaagcttttaggggtgatgttgtttgtaacttagcctcaaagatttttttaaaaatcagaaaaagaaaatacataacagagaagagagcaagtgataaaggaaatgaggtagaaatgttaccaatccatgaacctgagtataaaatacaagagagttctttgtcctattatttgtcttgcaactttttggtaaatttgaaattatttccaaaggaaaagttaaaacactttctaaaattgagagatctaaaatcttaggccaggcgtggtggctcacacctgtaatcccagcactttgggaggctgaggcaggtggatcacatgaggtcaggagttggagaccagcccggccaatatggtgaaaacctgtctctgctaaaaatacaaaaatcagctgggcatggtgggaggtgcttgtaatctcagctactcaggcacgagaatcgcttgaacctggggagcggaggttgcagtgagccgagatggcgccactgcactccaccctgggtaacagagcaagactccaactcaaaaataatatgaaataaaataaaatcttagacaacactatcattataagtaggattggggagatcaaaaacaacatgctctgtgctccaggtactgtttggtgtgatgttgaaaatattagattttaaacttgattttttcttttttttttttttgaggcagagtgttgctctgtcgcccaggctggagtgcagtggcgtcatctcggctcactgtaacctccgcctcctaggttcaagcgactcttctgcctcagcctcctgagtagctgggactacaggtgtgcgccaccacacctggctaatttttgtatttttagtagagacggggtttcaccatattggccaggctgatctcgaactcctgacctcatgatctgccctcctcggcctcccaaagtgctgagataacaggcgtgagccactgcgcctagcctagacttgattttttaaatttctgtcctccaatagaaatagacctgatttttaaaaatgtgcatggccaggcacagtaattcatgcctataatcctaggactttgggaggccaatgtgggaggatcacttgagcccaggagttggagatcaacctggacaacatagctagaccctgtctctacaaaaataaaaatattaggtgggtgtggtcttgtacacctgtagtgccagctacacagggggttgaggagggaggatccattgagaccaggagttccagcctgcaacgagctaggatctcaccactgcactgcaggctgggcaacagagcaagaccctgcctcaaaaaaaaaaaaaaaaaaaaaagcatgttaaaatttcaaagattgctacaaaaagaaagaaatggtgcatagattccaaactagtagagggaaaacaaagaataagaaaacataagacaaaactaaacaaaaaatgcagccaattcaaagaagcttaaatgagcatgaaaaaataaataaacgtagaaaaatgaggacactagaatcacaaagcaaaatggtagaagtaaataaaatacatcattaatcacatacacaaaaaatgtattcagggccaggtatggtggctcacacctgtaatcccagcactttgtgaggctggggcagacggatcacttgaggcaacaagtttgagactagcctggccaacatggtgaaaccccatctctaccaaaaatacaaaaaaaaaaaaaaaaaaaaagaagaagaagttatccaggcattgtggtgcacgcctgtaatcccagctacttgggaggctgaggtaggagaattgcttgaatccaggaagtggaggttgcagtgagctcagattgcaccactgcactccagcctgggtgacagagtgagactccctctcaaaaacaaacaaagaaaaaatgtattcagaggccaaatacttcttaccacctccatagctgccacccatatcttaccctcctcctagggtttggagttcctactcctggccccacaatctctccccgtcatgcagatagagggactctgggaataaccaagtcaactcaactccctctgctgctcaaaactttcctgtggctccatctcactcaaagattattttgctcattttttttttgtttttttttgagacagggtctcactctgttgcccaggctggagtgcagtggtgcaagtcatgactcactgcagcctagacttcctcggctcaagccatcctccaggcctccagggctaccacaacccagccaattttttgatagagacgaggcctcccttattgcccaagctggtcttgaacttatgggctcaacttatctacccacctcggcctcccaaaatgctgggattccaggcctgagccactgtgttccgccaatctcattcaaagtaagagccaaagtcctcactgtggtccagcagactctgcaccgtctgcttcttgttccctctctgacctcacctcccctccaccccccacacgctcctctgcagcaacacggatctccttgttgtttctctaagatccagacatgttcccatcccaccccaggaccttggcactggctgttccctctgcctaggggactctttccactaggttcagtttctctttttttttttttttgagacggagttttttcactcttgttgcccagactggagtgcagtggcacgatctcggctcacagcaagctcctcctctcaggttcaggcaattctcctgcctcagcctcccgagtagctgggactacaggcacccgccaccacccccagctaatttttgtattattagtagagacggggtttcaccatgtggccaggctggtctcgaactgctgatctcaagtgatccatctacctcagtctcccaaagtgctgggattacaggtgtgagccaccgcgcctggcccccttggctcagtccctcaccaccagcagaagaatggataaactgatcccacagtggcctgcaatgtgtgtgtgctgcaatgagaataacctgtaactgcacacgacaaccaggatgaatttttttcacggtgctgactgaaaaaagccagatgctaaaaagaacatattttcagattgcatttacatgaattcaaaacaggcacaaccaatctatgctgtcagaagtgagggtgataatgaccttggagggagggcaggtgataagggagcgccgagggggcttctggggggctggagatattgcttcttgggctggtggctggtgacacaggtgtgttcaatcggtgataattcctccagcggttacacttacggtttgtactttcctgaatatgggtctacttcaagaaaccactgctgaaaacgaggagctgcacccaccacccagtgtcccctccatccagtttaagcaacaggacattctcagccccccggggtccctccctcccaatgcaatgtgcttttatgtcttcaaggggcctggccaccaccttggttgcttcccccagcttgctatgcatgtcaccccacgcatgttccaggcagctccacagaggtccccagagagaaggcaggctgtgggtgggaggaagggcaggggtgggggacgtggcttcccagcggagcccgggcagggggaggaaacatttctgcaacaccccacaccaagtcctgacttcgggggggctttgcagggtgaattctaagtgcccagggccccatgtgaaggggtcaactgtgtctcactctgtgtctgtctctctgtctgtctctcttcctgtttcctccctccctcccagtctctctctcctcaagaagaaaaaaactcacaactatttacataacaattttatatcagactgtaacccaaaaacccaagttccaacttcgaatttttcaataaactttgaataaatagtagtgctatttttctttctttttttttttagtactgtaatgtttacttttaaatttaatttttactggcagactttacgtatatgaggttcaagaaaagaaaatctccactgtttacatttcttttctgactattaatattgttcatttcatttcctgattattactggcaataattttgtcctatggggaagggaggcgcttggcaggcctcgagttatcctttgagacatgggggtctgtggtcagatttagaaagtgcttgtgggtggctgggtgggagtgggtcatgggagacataagggcaggctggagtccagggaggaggccggccgggcagggacccaggcagcggagatggacagggccatggagaatctgggaggcgcaggccctggggactgtggattggggaaggagataattttattttattatatttttttgagacagagtttcagtctgtctccaagactgtagtgcaatggcacgatctctgctcactgcaacctctgcctcccgagttcaagggattttcctgcctcagcctcccaagtagctgggattacaggcacgcaccctcacacccagctaatttttaatatttttggtagagacggggtttcaccatattggccaggctggtctcatactcctgacctcaagcgatccacctgccccggcctcccaaagtgctgggattacaggcatgagccacgacgtctggcctaattttttgtatttttaggagagacagggttttgccatgttggccaggctagtcttgaactcctggcctcaagtgatccgcacacctcaacctcccaaagtgctgggattacaggtgtgagccactacgccccgccaagggaaggggagaatttgagtgctattgaaggtagaaaacacagaacataggctgggtgtggtggctcatatctctaatcccagcactttgggaggccaaagtgggaggctggcttaatcccaggagttcgagatcagcctgggcaacatagtgagacccctgtctctacaaaaaattaaaaattagccaggcatggtggcacccacctgtactcccaaggctacttaggaggctgaggtgggaggatcgctggatcccaggagatctgaggtgagccgtgatcatgccactgcactccagcctgggcagcagagtaagaccctgtctccaaaaataaaaaataatttaaaataaagcgcggaacactgtcaggttgtctgtgggggagcagcgggcaggcgaccaggagggctggctgctctgtgcagggctagtgcctgggttgggatgactcggcctcagagctgtaaataaagaaggaagagggccgggcgcggtggttcacgcctgtaatcccagcactttgggagggcgaggtggactaatcacctgaggtcgggagttcgagacaagtctgaccaacatagagaaatcccatctctgctaaaaatacaaaattagccgggtgtggtggcacatgcctgtaatcccagctactcgggaggctgaggcaggagaatcgcttgaacccgggaggcagagatcacagtaagccgagatcacaacactgcactctagcctgggcagcaagaacaaaactccatctcgaaaaaaaaaaaaaaaaagtagaagaaagaaagagctgccacagttgagagcttcctggatgcctttgttaactcttggggttttcacatacccatcttacagatggggaagctgaggctcagagagaggaaggcccaagtggaagagcaagcctggagcccaggtctcctcctgcctaatcctgggcttttgctggtggactcccgcccaatcttgaataacttcaggccttaaacaacctcccacgattgcttttcctcccattagaacaataaatgcagatacaaaaaccaactatgcttgtctacaaagcccaagagaatttttgaagtaataaaactgtcatgaatgcagactgtggtgattacatgacttacgaatttttcaaaactcagaatcgagccagatgaaatgatcctgcctgcaatcccagcactttgggaggctatggcaggaggatcatttgaggccaggagttcaagaccagcctggccaacatggtgaaaccccgtctctactaaaaatacaaaaattagctgggtgtggaggcacatgcctgtaatcccagctatttcagcagctaaggcaagaaaattgtttgaacccggaggctgaggttgcagtgagaaatgatcgtgccactgcactgtagaccctgtctcaaaaaccaaaaccaaaaccaaaaaaagaaaaaaaaacccttaagaatcaggattatacacgagcacacgcacactcacccataaattttaccatttgtagaaaagaagaagaaaattcaaaaccaaatacaatgaatgtactttctctggattccaattcacaccaaacaactgtaaaaatctgtttttgagacaattggggaacacaaactggcttttaggagatattaaggaatttcggttaattatgctagacttgataatgccattgtggttgggtaatgcccacataccatgccttggctgggcgtggtgactcacacctgtagtcccagcattttgggaggcccagatgggaggattgcttgagctcaagagttcgagaccaacctaagcaacatagtgagacctcatctctacacaaaattttaaaaaacattagccgagtgtggtggggtgcgcctgtaatctcagctactcaggaggctgaggtgggaggagtacttaaacccaggagtttgaggttgcagtgagctgagattgtgtcactgcactccagcctgagcgacagagcaagaccgtcaaaaaaataaagaaagaaaagaaaatgtaccctattcttctcttcaaggtgctcattgaagtatttacaaatgaaacaacataatacctctcacctgtaattttttaaaatttttatttattaattttttagagatggggtctcattctgttgctcaggctggagtgcagtggcatgatcacagctcactgtaacctcaaacttctaggctcaagtgatccgcccgcctcagtctcccaaatagctgagattacaagcactggccaccatgctttgctaatgttttaaaaattatttttgtagacacaagactatattgcccaggctggtctcagactcctggcctcaagtgatcctcccaacttggcctcccaaagtcctggaattacaggcctgagtcaccgtgcctggccaatttttttttttttttgaggtggagtctcgctctgtcgcctaggctggagtgctgtggcctgatctcggctcactgcaagctccgcctcctgggttcacgtcattctcctgcctcagcctcccgagtagctgagactacaggcccccaccacgcctggctaattttttgtatttttagtagagacggggtttcaccatgttagccgggatggtctcgatctcctgaccttgtgatctgcctgcctcggcctcccaaagtgctgggattacagacgtgagccactgcgtcctgccctgcctggcctattttttatttttatgttttttacagacagggcctcactatgctgcccggactcgtctcaaactctgggctcaagcgatccttctgcctcagcctcctgagtagctgggactacagggtgtgattttttttcaagtattcaaaaaaatggggaggggaaagaagatgaaatggcaaaatattgatggttcttgaacctgggtgatgagtatatgtaagcttattgtctcttgactttttgtgtctgtttgaaaattttcatgatataagagtttaaaaactgaaaataaaatttattgaaggagagtttgggccgggtgcaatggctcgcgtttataatcccagcactttgggaggccaaggcaggtggatcacctgaggtcagaagttcaagatcagcctggccgacatgacaaaacactgtctctaccaaaaatacaagaatcaggctgggtgcggtggctcatgcctgtaatcccagcagcactttgggaggctgaggtgggtggatcacaaggtcaggagttcaagaccagcctggccaagatggtgaaaccccgtctctactaaaaatacgaaaattagccaggtgttgtggtgggcgcctgtaaattccagcaacttgggaggctgaggcagagaattgcttgaacctgggaggcagaggttgcagcgagccgagattgcgccactgcactccaacctgggggacagggcgagactccttctcaaaaaaaaaaaaaagaaaaagaaaaagaaaaattagccaagcgtggtggcaggcacctgtaatcacagctactcgggagctgaggcatgagaatcgcttgaacccgggagacggaggttgcagtgagccgagatcgtgccactgcactccagcctggggtatagagcgaggctctatctcaaaaaaaaaaaaaaaaaaaaaaaaaaaaaaaaaaggagagtttggcgttcatcaagcaacatttggaaactacagagaactagcaaggcaaagacgcccctcccatccctaagtcctgtaccactatggttgttgacattttgatatatttcctttcagccttttctattctctgtgagctttttaaatgcgtgtgttgtgtgtgtgcacgtgtgtgttttacataactgtgtgagcaaattgtttatacagccctgttttttcccctcttaaaatgtaagctgttcccctgttaaaacatctttggataaacacaatctctaatgtttgcactatgtttattcaaaagggcagcattgccagaggttgaagctgtttccaatttcctcccattataaataatcccctcatggacctccttgtgtgtcccagaggagggattcttgggccaaagggtgcggaccctttggcagagctcatggtcaaaaatctcggcagagtttcagcctgacccgaagctaagatgacctcatacggttaaagtgagattggactgctatttatttcctgaacgtttgattcatgactcaggcttgtcaggggatcttttttttttttttcttctgtatgtgcttggttgcaagaaacagaaatccattcacactagctcacgtcaaaagggcaagagaatcgcttgaacgcgggaggcggaggttgcagtgagccgagatcgcgccactgcactccagcccgggcgacagtgcgagactccgtctcaataacaaacaaacaaacaaaaaaagggcggggggtgttgtatccttcagcaagtaaagctcatattcagcttggactagctgtctgcggagcatgttgttggggtatatctaggctatgttgattgttgaaatactgaattatttccgtattggttggtaaatcattctgtctcaagtcgctccaatgacgtcctccaccaaggccactctagctgccctggtccctctcccaggacttcccagacctctccacaatgcaggaagtaaagggtcaatatcgggcacagaagtgaaccatgctgctcggtcagtgcccaaagtattggttgtgaaattcattttttcttttcttttttttttttttggagacaaattctcactatggaactcaagcgatcctcctgccttggcctcccaatgtactgggattaaggtgtgagccactgcacctggactgcttgtaaaatatttgatgattcgcctagatgcaagtaccagaacagctgactcaaatggcttaaattgtaaggggaatctgtggctggaaaatccacacttgtgctggcttcagccaaagttgacacaatggctcagccatgtcaccaaggactttcttttctttctttccttctttctttcttctttctttttttctttcttttctctctctttctttctctctctcttttttttttttttttttgacgtagtctggttctgttgcccaggctggagtgcagtggcacaatcttggctcactgcggcaacctccaattccccggaattcaagtgattctcctgccttagcctcccgagtagctgggactataggtatgtgccaccacgcccagctaatttttgtatttttatttttttatttattatttttttaatcattcttgggtgtttctcgcagagggggatttggcagggtcacaggacaatagtggagggaaggtcagcagataaacaagtgaacaaaggtctctggttttcctaggcagaggaccctgcggccttccgcagtgtttgtgtccctgggtacttgagattagggagtggtgatgactcttaacgagcatgctgccttcaagcatctgtttaacaaagcacatcttgcaccgcccttaatccattcaaccctgagtggacacagcacatgtttcagagagcacagggttgggggcaaggtcacagatcaacaggatcccaaggcagaagaatttttcttagtacagaacaaaatgaaaagtctcccatgtctacctcttcctacacagacacagcaaccatccgatttctcaatcttttctccacctttccccattttctattccacaaaactgccattgtcatcatggcccgttctcaatgagctgttgagtacacctcccagacggggtggtggccgggcagaggggctcctcacttcccagtaggggcggccgggcagaggcgcccctcacctcccggacggggcggctggccgggcggggggccgacccccccacctccctcccggacggggcggctggccgggcagaggggctcctcacttcccagtaggggcggccgggcagaggcgcccctgacctcccggacggggcggctggccgggcggggggccgacccccccacctccctcccggacggggcggctggccgggcagaggggctcctcacttcccagtaggggcggccgggcagaggcgcccctcacctcccggacggggcggctggccgggtggggggctgacccccccacctccctcccggacggggcggctggccgggcggggggctgacccccccacctccctcccggacggggcggctggccgggtggggggctgacccccacctccctcccggacggggtggctgccgggcggagacgctcctcacttcccagacggggtggctgccgggcaaaggggctcctcacttctcagacggtgtggctgccgggctgaggggctcctcacttctcagacggggcggttgccaggcagagggtctcctcacttctcagacggggtggccgggcagagacgctcctcacatcccagacggggcggcagggcagaggcgctccccacatctcagatgatgggcggcctggcagagatgctcctcacttcctagatgggatggcggccgggcagagatgctcctcactttccagactgggcagccaggcagagaggctcctcacatcccagacgatgggtggcccggcagagacgctcctcacttcccagacggggtggcggccgggcagaggctgcaatctcggcactttggggggccaaggcaggcagctgggaggtggaggttgtagcgagccgagatcacgccactgcactccagcctgggcaccattgagcactgagtgaacgcaactccgtctgccatcccggcacctcgggaggccgaggctggcggatcactcgcggttaggagctggagaccagcccagccaacacagcgaaaccccgtctccaccaaaaaaatacgaaaaccagtcaggcgtggcggcgcctgcaatcccaggtactcggcaggctgaggcaggagaatcaggcagggaggttgcagtgagccgagatggcagcagtacagtccagctttggctcagcatcagagggagaccgtggaaagagagggagagggaaaccgtggggagagggagagggagagcgagagcgcatcagagtattttaacagcagaattgatcaaacagaagaaagaattagtgagtttgaagacaggctatttgaaaatacacagtcaggccgggcccagtggttcatgcctataatcccagcattttgggaggctgaggtgggcggatcacctgaggtcaggagttcaagaccagcctggccaacatggcaaaaccccgtttctagtacaagtacaaaaattagccaggaaatggtggcatgtacctgtagtcccaactactcaggaggctgaggcacaagaatgacttgaacccaggaggcagaggttgcaatgagccgagtttgttccattgcactccagcctgggtgacagagtgaggctctttaaaaaaaaaaaaaaaaagtccaggcgcagtggctcatgcctgtaatcccagcactttgggaggcggaggcgggcaaatcacctgagatcgggagttcaagaccagcgtgaccaacatggagaaatcctgtctctactaaaaatataaaattagccgggcgtggtggcaaatgcctgtaatctcagctactcaggaggctgaggcaggagaattgcttgaacccaggaggcagaggttgtggtgagccaagatggtgccattgcactccagcctgggcaacaagagtgaaactcttgtctcaaaaaaaaaaaaaaaaaaaaaaaaagatgaaagaaagaaagagaaagacacagagacaaaaaaagaagagaaagaaaaagaaagaggaagaaagaaagagagaaaagaataaaaaaaaagaggaagaaagaaaggaaagaaaaaaagaaaagagaaaggagggagggaaggaaggaagaaaggaaggaacgaacaaacacagtcacaggagacaaaagagaaaaagttttttgtatttttaatagagaccgggttttaccatgttggccaggctggtcttgaactcctgacctcaagtgatctgcctgccttggcctcccaaagtgctgggattacaagcgtgagcccccgtgcccggccagaccccatttctcccatttctttttatctctctgctttatcttttccagtggaagctcccaagatgactacctccagcctctggccacagggaaccttcttcatatcccacaagcaaaggagagcacctttggctcaggtttcctgccaaagtaatgaggctaactctgattgggccaacagagggcacgtgttcatgcaagagccaatcactgtgatcggagggacagaaggaaaaaccataatggccagattggctgagccaagtcacatgttcctcaaatagtaaggtgagtggctcacactagggctgcaggagccacacctgggttcaatttccattccaaacaaatttctgtcttctctgccctgtttcccgtcagtaacatagagataatgaaggcactcatatggtagagttcccgtgaggattaaatgagttagttaatgcaaagcactgagaatggtgcccatatacagaaagcgttcaaatgttagcttctgttatcgtcattacatggccattctcacctcttaaggctgcttttctttgcaagctccttatgctccacacatttccctctttctagttactattgcttggtaacaaatcactccaaaatatggtggcccaaaacaacaacagtcatcctattatttttcactgtgtctgtggtcagagttttgggaaggacccaactgggcagttctgacttggaatttcatatggttgcagtcacttggcagctgaaactggaacagggaagcagctgggggtggatggatctctctctctctctctttctcttactctctccccactccatgttgtctcagggcttctcaatgtggtctctccacgcgaactggtttgggctccctcacatcatgacagcctctgggcagttggacttacatggcagcttcggcatccagtacaagtgttttatgaaagtagcagccgcgactgggtgcggttgctcacgcctgtaatcccaacactttgggagcttgaggcaggtggatcacctgaggtcgggagtccaagaccagcctggaaaacatggtgaaatcccgtctctactaaaaatacaaaaattagctgggcatggtagcacgggcctgcggtcccagctactcaggaggctgaggcaggagaatcgcttgaacctgggaggcggaggttgcagtgagccgagatcacgccactgcactccagcctgggcgacagagtgagactccatcgaaatgaaagaaagaaagagaaagagagaaagagagaaagaaagaaggaaggaaagaaagaaagagagagaaagaaagaaaggagggaaggagggagggaaggagggaaggaaggaaggaaggaaggaaagaaggaaaggaaggggccttatctcttctgatctagccttggaatcatgcagcattacttctgccacatagtcttggttacaagcaagtcacaaactgcctagatgtaaggggagcttacacaaattccacttcccaatggaaggggtatcaaagttctagaggaatatatgggctgggaaacattgttgccaccatctttggaagttacatctggcttttactggtactgatttaagacccacctctatacagcctgtgcccaataacatccacctgggcacagctccaactccctgttctaaacagaaatagtttattgagaaatctcaatcccttgggatcaaaaacatgacagtttccatttgttctgcagtgactgctctctacctgctatctattgttttccaagactatgatccaaaatcacagcatccaagactgtgtcttttttatttatttattgttttcgagacagggtctcactctgtcgcccagactgtagtgcagtggcgcaatctccactcaccgcaacctctgcctcccaggctcaagagattctcctgcctcagcctcctgcgtagctgggattacaggtgcacaccactactgcctggctaatttttgaattttcagtagagacagggtttcaccatgttggccaggctggtcttgaactcctgacctcaaatgatccacccaccttggcctcacaaagtgctgggattacaggcatgagccaccacagctggccccaagactgtgtctttattattattattatttcgagacagagtctagctctgtctcctaggctggagtgcagtggtgcgatctcagctcactgaaaccttcaccttgccagttcaagccattctcgtgcctcagcctccggagtagctgggattacaggcacgcaccactacacccggctaattttcgtattttcagtagggacggggtttccccatattggccaggctggtcttgaactcctgacctcaagtgatccacccacctcggcctcccaaaggtggctcacagaagtgagccaccacgcccggcctgtctattatttttatttttaaaaataaatgtattgttaatttcctttttcctgttggataaaggctacagggaaacttaatgacaattttgctagagtctttaatatttctctcattttcattcatttaaaaacatagccttcaggccaggcacggtggctcacacctataatcccagcactttgggaggccgaggcaggtggatcacttgaggtcaggagttcaagaccagcctggccaacatggtgaaaccccgtctctactaaaaatacaaaaatttaaaaattagccgggcatagtggcatgtgcctgtagtcccagctactcaggaggctgaggcaggagaatcacctgaacccaggaggtggaggttgcagtgagctgagatcgcaccactgcactccagcctgagcgacagagtgagactcggtctcaaacaaacaaatacacaaaaaaacccacaaagttcatggggagggaaaggtgtagcctctcttgagaactttcctctctcattttccccccaaacaggatgatgcttcctttctcttctctatccttttctggacagccttgggtcctctcagtaacttatttgggtaagtggctggttataatggcagtgacctcgaacttaggctctggggtagttggccacttttgtcctcagttttgggcagtagtagcaattctggaagttctgggaaaaatccaatttgacatcatagtacgaacctgaaggaaaggtcttgatcccaaagagctctcggcagctcatggctgtgactgtcatccagggcctgggcctggggaaatgtttggggatctgtgggatcctttagggactgtcacagtgactcgggaaatgttgctataggcaactgttctggaactttttggtcttaggactcttttacattcttaatagtatcaaggaccccaaacagcttttatttgtgtgggttataacttttttttttttttgagatggagtttcattctagtcgcccaggctggagtgcaatagtgtgatcttggctcactgcaacctctgccccacaggttcaagcaatcctcccacctcagcctcccgagtagctgagactacaggtgtgcgccatcacgcctggctaatttttttgtatttttattagagacagggtttcaccgtgtcggccaggctggtctccaactcctgacttcaggtcatccatccgcctcggcctttcaaagtgctgggattacaggcatgagccactgcgcccggcctgtgtgggttatagctattgatatttaccatattagaacttaaaactggccatttaaacaaattttttattattgattgatttttgagacagggtctcaccctgttgcccagagtggagtgcagtggcatgatcacagctcactgcagcctcgaactcctggcctcaagtgatcctctcgcttcagctttctgagtggttgggactacaggtgtgcaccaccacacccaactaatttattgatttttttgtatacacagtcttgctgtgttgcctaggctaaaactgacaatattaaaatccagccatccacaagcacacactggcagagcaattatgtcatcacatgtcatggagccattgtatgctcataagtgaatgagattgaaatacgcaaaaaaagtcctggaattattatgaaagtaattttggccgagcgcggtggctcacgcctgtaatcccagcactttgggaggccgaggcgggcggatcacgaggtcaggagatcaagaccatcctggctaacatggtgaaaccccgtctctactaaaattacaaaaaaaaattagccgggggtggtggcgggcgcctgtagtcccagctactccggaggctgaggcaggagaatcgcggagcttgcagtgagccgagattgcgccattgcactccagcttgggcgacagagcaagactccatctcaaaaaaaaaaaaaaaaaagaaagtaattttaactttgtggacaaagtctcagggacctccaggaaaccctggaccaaactttgaaacttgctctaaaagcatttgtaagcctgggatggttaggtatgttcaacgtgcagccatgtaggagatagtgcatgtcaaaagggcccctttggatgggttaatatcactttggttcagttatctgtggcctggaaggggtcccttgtgtacaaacaaagctggggagtaggagggaagaatttttttttttttttgagacagagtcttgctctcgtcccccaggctggtgtgcaggggtgtgatcttggctcaccgcaacctctgcctcccaggttcaagcaattctcctgccttagcctccctagtagctgggattacaggcacctgccaccacacttggctacgttttgtatttttagtagagacggggttttgccatgttggccaggctggtcaaccctgacctcaggtgatccaccctccttggcctcccaaagcgcagggatttacaggcgtgagccactgcgcctggcccaggagggaggaatcttaaccataatgctcatcttgtactatctactggaaaccctaaaaatacagagaccctggagccactttctgggttctgctccccttcattgctttctagctgtgtgactttgggccaagttccttaaccactctgtggctcagtttctcttctggaaaatggagacaataatagtatctgcctctcagcgttgttataagagttaccttggcacacagtgttatgtgggtgtttacgctgagtattactgttattacagtaatcattcaaatccaagaagccatcaaaggtaagatgcattgttttttattttattttattttattttttatttttattttgagacagagtcctgctctgttgcccaggtgggagtgcagtggtgcgatctcagctcactacgacctccacctcccaggttcaaacaattctcctgcttcagcctcctgagtagctgggattacaggtgtgccctaccacgcctaagttttgtatttttagtagagatggggtttcaccatgttggccaggctggtctcaaactcctgacctcaagtgattcacccgcctcagcctcccaaaatgctgggattacaagggtgagccaccacacccagccaagatgcattgtcacttcaaatccccaggggagaaaaaacagctgccagttaaactatgacacataatcatttataagacacatcctgatttccaagtcattgaaaaggggtggggaggataaataagtcaattaaaaatggttttattcggcctggcgtggtggcttacgtctgtaatgccagcactttgggaggctgaggtgggtggatcacgaggtcaggaagttcgagaccagcctggccaacgtggtgaaaccccgcctctactaaaaatacaaaaaattagccatgcctagtggcacaggcctgtaatcccagctactcgggaggctgaggcaagagaatctcttgaacccagaaggcagagattgcagtgagccaagatcgtgccattgcactccagcctgggtgacagagcaagactccatctcgagaaaaaaaaaaaaaaagatggttttattctggaataggagagtatttaaggaaagaaaataaaaaataaaggaaaaaaagaaattttaaaattaaaaaaaatgatttcatgtgtacagaagaatttagcaacaaggatgtccaccacagcacttgtcataatggcaaacctgctgaaaccccaaccattatggattaactgcacaagttaagagagagccacaaaatattgtgactgaaggggttttcaaagattgttccaaaaccctggggatcctcaaaagtgaatcaatttctctctttcataatctttttcatcttcactctcctatgagtgcataaagcaaaaaataataagcaggtgacttctaaaaagaaaaaacctctggaaactatgcctcaaccccattctagagcctgctgggccactgctcagaaaaggaaatgtgtgccccaggctgacccactcttaagacaacccattctccacatgcctctgccttcagttacacagctgtacccagagaggggtcttgtctttactcagctgtccatccaccctccctgtgttgcaatgaatacatccctggtatcttctgtgcctggccccagcccaccccctcctcagagctccagccacacattccagtgccttcgagactcacctgctttgaaaggtagatccttacattcaattttcttgttgaaatacttcatgtggtttcttttttcttgacaagcctctgaccaacacttggtggtcattcttaaaccgttgatttttccccttcacacctattcccctccacgatcacaatcttcccagtctcaaaaatgtctctacctgggacctcaagccagaaacccaggcaatatggaggcacttcctctcctcattccacatatgccactcatggacaattcctgctttcctctaaggcagatgcttaccacacccctacccccacccttctatttagaaaatttctaaacatgcaaaagaattgcaagaaaagtagaagatataataatatactgtggatatggattcactaggtttttgcagttttttgtttgtttttgttttgagacggagtcttgctctgtcacccaggctggagtgcaatggtgcgatctcagtgcaagctctgcctcccaggttcaagcaattctccctgcttcaaccttccaagtagctgggattacaggcacccaccaccatgcccagctaatttttgtatttttcagtggagatagggttttgttacgttggccagctggtcttgacctcctgacctcaggtgatccgcctgccttggcctcccaaagtgctggattacaggcgtgaaccgtcacacctggccttttgtgtttttgtttttgttttggtttgtgtgtgtgtgtttgtttgtttgtttttgagatggggtttcactctgttgcccaggctggagtgcagtggtgtgatcacagctcactacagcctcaacctgctaggctcaagcgatcctcccttctaagcctcttgagtagctgagactgcaggtgcccaccaccacacccagctaatttttgtattttttgtagagacgggttttcaccatgttgcccaggctgttctcaaactcctgggctcaagtgattccccccaccttggcctcccaaagtgcttggattacaaacgtgagccactgtgctgggcctatttctttgtgttttaagaggcagggtctttctctgttgcccaggtggagtacgatgattcgatcatagctcactgcagcctcaaactcctaggcacgggagaccctcctgcatcagcctcccgagtagcccagactacaggtgtgtgccactatacctagctaatgaaaagaatttttttgtagacatgagttcttgctatgttgtctaggctggtctggaacctccagcctcaggcgatccccttgcttcagtcttccaaagcagtggggttacaggcgtgaaccacctggcctggtctcgctctttctctttcgacatctacattgatctgtagctatctacgtactatagatatctaaaagttatgtaaatgtctacttaagcttataggtatgagctactgtatgctatctaagcttataggtatgagctacaaattgctattgtgttatgaggggaattcaaaaagttgatggagaatggaattaagagataaaaattttaaaaaaatctttatttctcaccataaactccatcaaggtcaaagtcaagacacttttgtaaaccattataccagccatttagtctatccctaaataactgagggtcccaggaatttaatcatgtcagtgcagcctttttacattttctctttctttttttttttgatggaatctcactctgttgctcaggctggagtgcagtggtatgatctcggctcactgcaacctctgcctcccgggttcaagccattctcctgcctcagcctcctgagtagctgggactacaggcatgtaccaccacatctggctaatttttttttttttagtagagacgaggttttgccaagttggccgggctggtctcaaactcctaacttcaggtgatctgcccgcctcggcctcccaaagtgctagcattacagttgtgagccactgtgccaggccttttttttttgttcttgttgcccaggctggagtgcagtggcatgatctcggctcactgcaacctccacctcctgggttcaagtgattctcctgcctcagcctcccgactagctgggattacagtcatgagccaccacacctggctaatttttgtatttttttttttagtagagacagggttttgccatgttggtcaggctggtcttgaactcccaacctcaggtgatccaccctccttggcctcccaaaatgctaagattacaggcgtgagccactccgcccagcccagtctttttacattcttaactgaagaaaaatgggtgcccttcaaagattttaagattaggaaacaaaaagtcagaaggagccaaattgggactgccaagtggatgcctaataatttcccatcaaaacttgtaaaattgctcgtttgatgaggagaatgagcagaagcgtagacatgctggagaagaactctctggtgaagcttcccaggcttatttctactaaagcttcggctaactttctcaaaacactctcataataagcagatcttattattctttgaccctacagaaagtcaaccagcaaaatgccttgagcatccccaaaaactgttgctatgacctttgctcttgaccagtgtgcttctgccttgactggatcacttccccgctcttggcaatcattctctgattacgatttgtctttaggattgcacccgtgaaaccatgtatcatttcccgttacaatccttcaaggaaatgcattaggatctcgatctcacttgtttagcatgtccatggaaagctctgctcttctctgcagctgatctgggtgcgaccgttctggcacccatcgagtggaaagtttgtttagctttaatttcagtcagaattgtgtaagctgaggccgggtgaggtggctcaagcctgtaatcccagcagttcgggagaatgaggcaggaggatcacttgtgtccaggagttcaagaccagcctgggaaacctaatgagacccccatctctacaaaaaatacgaaaatttagtgtcaggcctctgagcccaagctaagccatcatatcgcctgtgacctgcacgtatacatccaggtggcctgaagcaactgaagagccacaaaagaagtgaaaatagccttaactgatgacattccaccattgtgatttgtttctgccccaccctaatgatcaatgtactttgtaatctcccccacccttaagaagtttctttgtaattcttcccatccttgagaatgaactttgtgagatccgccccctgcccgcaaaacattgctccaaactccaccgcctatcccaaaacctataagaattaatcataatcccaccaccctttgctgactctctttttggactcagcctgcctgcacccaggtgaaataaacagccttgttgctcacacaaagcctgtttggtggtctcttcacagggacgcgtgtgacacttagctgaacgtgctggcacgcacctgtagttccaactacttcggaggctgaggtggaaggatcgcttgagcccaggaggttgaggctgcagtgagccacaatctcaccactgtactcagcctgggcgacagtatgagaaccctgtctcaaaaaaaaaaaaaaaaaaaaagaaaaaagaattgtgtaagctgtaccaattgagatgtctatggtgttggctattgtttctgctgttaactgtaagtcctctttaattaaggcataaacaaatttaatttttttctgcaaaaattgatgtggatggtatgccacggtgggcttcatcttcagcatgacccaggctggagtgcagtggcgcaatcacggctcactgcaacctctacctcccagactcaagtgatcctcccacctcagcctcctgagtagctggaactacaagtgtgcaccaccacacccagctaatttatgtattttttgtacggatggggtttcaccatgttacccaggctggtctcgaattcctgagctccaatgatccgctggcctcagcctcccaaagtattgggattacaggcgtgaaccaccacgcccgaacttgtcccttcttaaaacgagttatccatttgtaaatggctgatttctctggggcactgtcaagtttttggaaaacatcaatgatttcatcattcttccacccaagcttcaccatcaatttgatgcttgttcttgcttcaattttagaattcgtgttgctctgataggggctcttttcaatctgatgttttattttagtgtctcaaactaggtcctgttcagacaagttataacaagttagtatgaatttattttggtgcaaaaaaaaaaaattgaactccatgcatagttttttcataatacacattttccatgaatttttggaagacccttctttttctctcttttttttttttttttttttttctgtagagatggtcttgttctgtcacccaggctggagtgcagtggcacaatcatggctcactgcagcctcgacctcctgggctcaagcaatcctcccacctcagcttcctgttactgggactataggtgtgcaccaccacaccttgataattaaaaaaaaaaatttttttgtagagatcggggtgggggggggggtctcactatattttccaggctggtcttgaactcctggcctcaagtgaccctccccaatcagcctcccaaagtgctgggattacaggcacaagccacagtgcctggccaataaatgttttttgaatgaatgaagaaattagtgcatggacatattttcccatcagctattacaataaccagactctgagttccctgaaggcagggcctgtgagtttcattgtgtaccctcagccctcaatagctgataaaaataaatattcagaaaatgcttgtaaaatgaagaagagaatatgtatgggacagaaagtagaccagtggttgcctggggctgggacagggaatagggagcgactgcaaatgggcagaagggatcttttcagagtgatggaaatgttcttgaattggctgtgatggctgcagaactgtaaaatcacccaaaatcagtaaatcacttataataggtgaattttatgacaggtagattatacctcagtaaagctgttaaaacaaaaccagtgttgagggaggaaataaatgttaccttggtaatactgaggactcagtagttatcaagacagctctcttccctgccctcatgaggttttctgtgcagggcggggacgccgacccattatagacagtgacagcctagagccatcacggcgggatggtggggaggggacaggcagaggggtgggaggccaggatgggggaagcccgggcagagaggttgggctggaatggggggcacaggcagaggggtcggggcggggactggtgaggtgcaggcagagggcaaaggggtcgaggtccagatgggagatgtacaggcagacggatccgggccagggcggggaggtacaggcccagttgaggagcataaggaaccataggagcccaaaggaggcgcccgaccagtcagggaggacttcccagaggggtgaatggctgagccagggcctgaagtataatgttcatgaatgcgacagcaatttttttttttttgagaccgagtctccctctatcactggagtgcagtggctcgatttcggctcactacaacctccacctaccgggttcaagcgattctcctgcctcagcctcccgggtagctgggactacaggcgcccgcccccacgtccggctaatgtttgcatttttagtcgagacggggtttcgccattttggccaggctggtcttgaacccctgacctcaggtaatgcacctgcctcggcctcccaaagtgctgggattacaggcgtgagccaccgcgcccagcacaattttaatttttcttaaacacttttcctgccttagcaaagtcttggaggggcggccgcccaggcgccgcgagcgcaagaccacgagggggcgctgcttcaccacgctagaggagcgctcccggcaaccacgtggccccacaggtgcgggaggtcggcgagcgcgcctggagggtggacggggtaggttacggccaggcagcccggggtggcgcgtggccctgcgcagggcagtggaagcagcgggccccagggagcatgagacgccgcgctccgtggggcggtcccagcgctgtgcagcgaggggccagggctgtccccggtcctgcgcggccggctcccggagaaactgtggcctcctgggggtggagctttaaaaaacaaaacaaaacaaaacaaaatcacccaacaggaagcggggtgggggcgcccggctctgtcacccgtggaatgcatcaaaatagcctgcgcggccgggggcggttccgggaaagggggcggccgcgaggggcggggctgcaacggagggcggagcttcccaaagaacgggagagaggagtgcagaaccggccccagggggacgtcctcctgttcccccaaaatgacctcgataggcgtttgtgtgggatggggttcctgggtagggcggggctttccagtgcgatgtccctggtctattcttagcgggctgaaacctggagaagtgggagtgggcggttgatccgggttccagggcctctttggagcgaaaagctccgtggagagccagagtctccatcctgggcgtgggagggaagatgggaaatgggccaagaggagcctgtgggaggtcctccccgggacggcccccttccatctgcatccgcgggaaccgttgtgggggcagctctgagaaaggctgctctgggcgcaaggaagggtggttgaacgaagagatcagtcagggacggggtgggggtgccttgactgtgtcccagatttgctgcgtgcttctgacctcagttccccatccttccagttgctcaaatcctctctgtcccagtcctaggccgtttctgcccctctcacttcctagtggtttgcagaggggaaacactgaggctgcctcttctgtgcctggccctgtgttggcacggggaagtgactgagacgccccagacccccttctccctcacagtccagtgaggcagacagacctgccaccagatagtgacagcccagaatgagtcattgagaggacgggggaggcacaggcagatgggtcagggctgggataggggaggagaggggcctgtaggatccaaggggagagtgggtgctgctgactcagtctgggggggttgaagagccgtctgaacttagaccaaaaaggtaggatggggccgggcgcctgttatcccagcactttgggaggcagagacaagaggatcgcttgaggccaggagttccagaccagattggacaacatagcgagacccccatctctacaaaataatttaaaaatcagttgggcatagtggtgtacgcctatagtcccagctactcaggaggctgaggtgggaagattggttgagcccaggaattcaaggctgcaatgagctatgattgccccactgcagtccagcccgggtgacagcgtgagacccctgcctccaaaataataatagcaaaaatactgggctgggcgcggcggctcacacctgtaatcccaacactttgggaagccgaggtgggcaaatcgctgaggtcaggagttccagaccagcctggccaacatggtgaaacccagtctctactaaaaatacaaaaattagctaggtgtggtggcaaggcatctgtagttccagctacttgggaggctgaggcaggagaatcgcttgagcccaggaggtggaggctgcaatgagatcacaccactgcactccagcctgggcgacagagtgagactctgtctcaaaaaataaataaatcctaatgaaaggataggatggggctcagggccttggaagagggtcaccttctaacaaaaggtatttgaacggagtcctaaagaatgagtagcattcttctgggaagtgctgtgtcaccatgaaggaaagggtgttctaggcagaaagaatgacaaatgcaaaagcttggaggtgagagtgtggcttatctctggcagggtcctctgctccctgcctgggacattcccccaacgtcataccccgacagagctgtcttaggtctcctagtcctggagtccacaagcaggttaatgggatgtaatggaaacgctatagagggcagacccctaggcttgttccctcacagcctgatgcttttttgtttttgagacagagtctcgctctgttgcccaggctggagtgcagtggcgtgatcttggctcactgcaaccttggcctcccaggttcaagcgattgtcctgcctcagcttcccaagtagctgagattacaggcacccaccaccacgcctggctaagttttgtatttttagtagagacggagtttcaccatgttggccaggctagtctcgaactcccaacctcaggtaatccacttgcctcggcttcccaaagtgctgggattaaaggcatgagccaccacgcccagccttttgttttgtctgcttttttagacagggtctcacgctgtcaccctcacaggctggagtgcagtgactgcatcacggaccactgcagcctggacctcccaggctcaagcaatcctcccacctcaacctctccagcagctgggactacaggcgtatgccaccacgcccacctaattttaaaattattttgtagagacagggtctcattatgttgcccaggctggcctcgaactcctgggctcaagcgatcctcccaccttggcctcccgaagtgctgggcttacaggtgagagccacctcagtgcccggcctcagcctgatggtttcacgactgcctttgactttggcccacactaatcaaatgtatcaccgtgggccactgactcaacttccccatctatccagtgggaatagaatattggactgcacaaaatcaaccacctcattttaaagagctataacgaaacaaaatttatatgttatatatttttaaaaatacatcttatagattaaaggactcaagaaacaatagcaagactgtaaaacgttgccacatcaggtgacactttggccagagttatggaaaatgctgacaaaacaagaatttgccagcatgggcaaagatatactgttaccaacccaacttgttaaaatattaatattgagctaattagaagtagtttttttttttttgttttttttttttgagacagagtctcattctgttgcccaggcaggagtgcaatggtgtgacctcaggtcactgcaacctctgctgcctgggttcaagcgattcttgtgcctcagcctcctggaattacaggcgcctgccaccacgcccggctaatttttgaatttttggtagagactgggtttctccatggcggccaggctggtctcgaactcctgaccttaagtgatctgcctgcctcgacctcccaaagtgctgggattacaggcgtgagccactgtgcccagccagcagttcataatatttgttttttattccttgattctaactctgtaaggaatagaaatggggtgattaattttggctcctttaatacccgcctggcaggtgctgagtcagtggtacctgttaccacgctatgactcagaggttatcactcagggacatccttctgactctgtttcagtccatgactcaggaggaaaggttctagggcctcaccagcgccctacacacaccctcgtttcccgaggggcaccattatattcttcctttattggctgtccttgtataatacaaatcttcaagtttagatacaaaaaaaatctggaaataaaagatagaaaagtacccgccaggcaccccttccccttcttcccggacccctccccagcgggcaccgacatgaggtaactgcgcatcttctcctcctcctccctccccgcctcctgggcccccaacttggccctagcccccatgagaccttggcccaaggaagacatgggccccaaagttggagggtgatggaggtgagtacagcattggcagtgaacgcagcgtgtgggcagagggcagcccttagcttgtgctgtgcatggggggaggagacgaccagatttggggtgggcactggtgtggggcccaggagagcccctaagcaagtgtcccccctccatcctgtccaacactggaaggtgggggtcaacagaaactgggaaatggagtgtgaaccaagggcattcagtgggattgtggccaacccctgtgtctggggttggggaagggggcattgccagcctaagtccggcagtgaaatggttcccttagccaggctgggtccgtccctgaattccatcctgttgcaacctgggcgtcacaatgttggttctgtagtggttgtcggggtggttgagggaggggggtgttgagagggtgttgaggggcgcagccccagggagcagggttaggggagaggttgtgcctccacccccaggcgtggggcacctggagatgatggagtgggtggggcggctcgggctacagttcaatctcgaatgtcttttgcaggtcgccagaaaaggggttggagggtttctctacagtggctttgccttctaatgccgcccactgggcctcaaaggggtccaactctggagctggggcaggcgctggctcagggggccagggggccccattggggcgagggcgggcctggctcccaggggcactgggtatggcagggggcgggaaggccccagctttcccaagcagagtggcaggctgaggctggagctgggcggctgagcagaaggcgtttgccaccatctgtgagggtgtgatgcccaccacgggcacccggggcatcggtgggtagcccaagcccgggtaggcgggcacaaaagggggctgcatgtgtgggggtggcaggaacacggccacttgggcaggtgcagcgtcaaagggccccacgggggcggggaaaggctgcagggcaggaggcatggtgggcactggggccactgaggctgcttgctgctgttgctgctgctgctgctgctgctgttgctgttgctgctgctgctgctgctgggccttggccacctgtgacacctcctccagccatcgctcagcctctgaaggtgtccgcttgtgcccaggctggaaggcagctgcagggggcacggagggctcaccccaggcagaagtccctggagagaggagagggacaggtgagggagggggcaacggcttcagcagaagaaccccaggctgggaactggcatggtgtggggatcagagcacggactctggagccagaccgcctgcctctgaatcccagctctgcacctcccgagcttgctgacttcaggcgagtgacttcaccattctggaccacgtaatggttctggagtgctaagaacatacaattctgagcttctaaggccctatgatgagaaagtctaagtaggactgacatcctcctagccccactacccttctgactggtcagtgccaagcctaggattcactattttgttttgtttgttgtctgttcgttttgagagtctcactctgttgcccagggatgccctatctgggctcactgcaacctctgcctcccaggttcaagcaattctcgtgcctcagtctcctgagtagctgggattacaggcgcgcaccattacgcccggctgattttttgtatttttagtagaggcgaggtttcaacatgttgcccaggctggactcgaactcctacctcaagtaatccccctgcctcggcttcccaaagtactaggattacaggcatgagccaccacacccagctggtattcactattttgaatatcacccttgattttctaataccttcagaatgtattgttttaggagttaagattctaagattgcatggatctttctccacatgtataatagtatcctaacatagtaaggtttgacagtttagggttgggctttctaagattctcgagttctacatttacagtgtttgagattctaaggtgcacctgtggttctaggataagcccatggctctaagatgatacatggttctcaaggattccatggttctgaaacgatctctgggctctaaggtgatcccaagattctagcatgagcacatgcctctgaggtgaccccgtggctctacaatgatcccgtatctctaagataattcatggttctaaagtgatcacttgattctcaggtaatcccacggctctaagatgatccttggttctaggatgatcctctggttctaagatgatctgtgtttctaaggtgatcctatggctctaagatgatccatagttctaggatgatcccatggttctaaggggatcccgtggctctaaaatgatcaagggctctgagatgatccatggctctaaggtgatcacatgattctcagataattccatggctctaagatgatccatggttctaggataatcccctggctctaagatgatccctgggtctaaggtgatcacatgattcttaggtaatcccatggctctaagatgaaccacggatctaggatgatcccctggctctaagatgatccatggctctaagatgatcacacgattctcagataatcccatggttctaggctgatcccctggctctaagatgatccctgcttttaaggtgattgcatgattctcaggtaatcccgtggctctaagatgatccatggatctaggatgatcccctggctctaagatgatccatggttctaaagtaatcgcatgattctcaggtaatcccatggctctaagatgatccatggttgtaggatgatcccctggctctgaggtgatccatggttctaagcctgtaggatcccaagacccctggagtgtctgggtagccctggatagaggaggggatacaggagggacatgcagggtgtctgcccagcagaaagcctggctttacctgttgtggcaggtggtggccctggtgctggcgctccagcactggcaaaagatgaactgatctgtgtgcacagagcgttgatgctgtcactgtcgccggcaccaggaggctccatctcaggcactgggaagcagggcaggacagaggtcagcaaacaggcccagaccctgccgcagccccgccctctaccccccgccctcggtggccctctcttctgacctggatcctttcccactgtagtaactaagtggccatgaccgccaaataactgtgcatatgtgtgtgtcacatctgagcggcagaacgactgagttagtgtgtgacatttgacggctgacagtaacagggaccccaaaccaaggacctcaagatttgtgtgtggccacaaaccagaagagttgtctaaaacacttagcaacatatattagtttaaaaatatgcccaaccacgtgcatggcaaggacatgggcccagtctgaatgggctgtggcatggccgctcactggctggggatcatttgtccagctttgggcagagaagtggggtcctgtccaccccacccaggctgatctatggcaaacatcatgagagcagagatacacctgtgccagcaaggcaggagacactgagcaggcatggcggccccgtgagggcttgtgatgagcaaaggtaccatccaaataaacaattaaggactcccatgtgtggtgtgtgacacatgtctgtgatgttttagccaatggctgtctccaagggaccatgtagatgctccagtgaacatcagaactggccgtaggagtctgcaggtgtgctgcgggggcgcccgggtgggacagccaatgtcgacaatgattgtgcatgttcgtccaaacaggaatgcagcttctgagagtgtgactggggtccgggtgtgtggcgtcctgatgcgtgactcccaggtgtgagtgcatctgccgtgtgatgtatgagtgtgtttgcaggtgtgcatggatctgcacatgtggctttggagtttgcataaatctgggtgtgtggtctgtgaaggtgtgtaaatctgagtgtgtttcttttttaaaaatatttatttatttatttttgacacagggtctcgctctgttgcccaggctggagtgtagtggcacaatcttagttcactgcaacctccgcctcccaggctcaagcaatcttcctgagtagctgggactacaggtgcatgccactgcacctggttaacaataaaggttaatttttaaaatttttttgtggagatgagatcttgctgtggtgcccaggctggtctcaaactcctgagctcaagtgatcctcctgcctcagcctcccaaagtgctgggattacaggtgtgagccaccacgtctggccatgtgtgacttctgactctgtgattttggagtgtgtgtgacttgagagtatacctgactgtgagtttgtgacttctgagcatgtgtgacatgtgtgtgggggggtgcaatgtctatgtgagtatgtgaaatttctgtgtggcaagtcacatccaaataagcgtgcagctggccacaggagtgtgaggcttccaaataaagcctggagctcctgccacctctcaggagcacgtgtgacagcctggggagtgtgcctgatgtcaggctgcgttaaggacagcaaatgtgagggtgtgtgatggcccaggaatgctgcaggcatggagggagcgtgcgtcactctcaacaagggttggcatctgctcaccggttaccttttggagcagcccagcctcctggatacagctcaacaccctcccacatcaatccccgaggacataacgggtaggcgatgcagatttggcatccaggagcaagagagtgggccagaccacatgggttcactggctgctggtggggaagacagcccttctgcctgcctccctcaggcaaaaactcagtagcgtgccacctctatcttccttccctatggcagagattgctcttaatttttttttttttgagacaggttctcactctgttgcccaggctggagtgaagtggcgcaatcttagctcactgcagctgggctgaagcaattctccttcctcagcctcctgagtagctgagactacaggcatgcgccaccacaccaggctagtttttgtatttttttgtagagacagggtttagccaagtgatctgcctcaagggatccttgagcccctcttgggctcaagtgatctgcctgccttggcctcccaaagtgctgagaccacaggcatgagccactgcacttggctagacatcacttttagatcatgatgtacaccacctgtctcctttccctggcccatggcagacattagtaatcaaacacaatgcttttttcccccacggagctctttgctcaccttacccgtcacctgtccagacctcatggctcccctggccaagtgctagaagaaacagatccttgtaactccatcttccctccaagtaaaacaggacctttatatctcctctctcttaccaccagccatggcagacaatgccaatcaattatgatgtgctgctccttttcgtgatgggtactgcctctgctcaactctgtgcctacaacaaatgttcctgatccatcactatgcccctgacccctgggatctctgagctcactggtgccctgcatgtcatgtttctactgaccaaattctgggagtctcccctttgggtaaaaacataacactcttgctactctttcttctcccttgcccatgacacacactgcatggagatcatgactgctaaccgatcatgatgtgtgccatctttctcgtttcccttaaccacagcagacattgctaattgatcatgacttgtgatgccttttttgccatcccttgatgctccctgccctaggcagacatttctaatccatcacaatcctcctttcctcagagcctgaggaatacctgtatccttcacctagccagatctcataggtgaatgcttggagggagggagcattaacctgtagtgcttcagtctactcctgagcaaaaacaggccaatggtgttgcttctcttctttccctggcccatggcaaacttccttatccatgcccgacttctttgtccatagccgactttgctaactaatcatgatgtgtgtcatctttctccttttccttaaccacaccagacattgctaactgatcataacttgtgatgcctttctactatcccttactcagagcagacacggcttatcaatcctgatttgtgctatctctttcctctcccttgcccactgctaatcgatcatgacatgttcccactctctctcctttgcccatggcagacagtgcaaatcaatcacagtgtgaaccatctcgcctccatcccttgcccacatcagatagtgccaattgattccaacgccgtttcccactgggcccagggctcacctgtgcccttcacctggaagtcagtgcggcgctgcagcgtggatggcagctcattcagccgtaggctcagctgccgtttgaaaggcgagttcttctggctgagtgctgggaacccacggaaggagccctggcgaaccagctgctccaggggtgcatggcgccgggggatggcggccgcagtggtgcctgcagccacaggggtgcctgcctcacccttctcaccaggggatgtggtggctggtgtcggggacacgtgcccaggctgggcagggccaggagccacagtgggggcagctgctgcctctgctggagacatgggggagatggatggttagatatctcaccatggcatgcaaggcctctcccacctggttctcttgatcattctccaaggctgccttccttgcccagtgagtcctgcccttaagacaagctagtcaaagccctgagatatccctcacccccacccaagtcatgatccccttccccaggaggctcttggaaaaccgtcccccaggctcaccctctgtgtctctccagcttcctgcccctttctgtcttgccctgctgctctcaccattcttccctctaagaccctctatctccctttttgatcacttaacaaacactgatttggtgctggaacaacgtatcaggcattgttccagatgcttttcaagtattcactcattcaatccacacgactacccatggggttgatatgattctcattttacagatgtggaaactgagacccagcaaaggcccagtgtgatgtgcccaagtcctactgctaggaaggggcaggctgactctggaccccatgctccaaatgactgcccgccctgtctccctctgacctgtctctccatatcatgttgtctttctctgtcactgtctgttcccctctgtctcccacctcccagccttcttcccacctcaagtagctcctcccttcctccagtcattctagacatggcttggatgcttcatcctctgagaagctttccagattgttccaggctctcagcctggctccctccactctgagactgttctctgtactctgggaggaaacctgacctccccactcagcaggagaggcaggctcttcaagggcagggctgccctcacccctgccaaaccacaaacacacatctaccctcctaccagggcctccccgagctgcagcctgaatgccatggagattaaactcaggcccagagagaccctcccataaggatgtcgcccagtgctgcttctcccatcgtgacacaatggggcacccatgcaggcctggcccaaggcagtggaaacagcccaggacaggttggaaccaggaaacctcctctgcctccactcactgtgtgacctcaggaagtcccctcccctctctgggctccagtttgccaactagaaacctgggataaacatctcagtgctacctcccaagcctctgagagggtcagtttaggtagtgaatgttaaatgttttggaatccaacaaaagcatgcctggacacagtggttcacgcctgtaatcccagcactttgagaggccaaggtggggggatcagttgaagccaggagttcaagaccagccttgccaacatggtgaaacaccatctctactaaaaatacaaaaaaagattagctgggtgtggtggcacacgcctgggattccagctactctggaggctgaggcaggagaatcgcttgaacccgggaggcagaggttgcagtgagccgagatcgcaccattgcactccagcctgggcaacagagcaagactctgtctcaaaaaaaaaaaaaaaaaaaaaaaaaaaacttagctggacgtggtggcgggcacctgtaatcccagctactcaggaggctgaggcacataaatgtcttgaaaccaggaggcagaggttgcagtgagctgagatggcactactgcattccagcctgggtgacggagagagactctgtctcaaaaaaaagatgttcttttttttccccttacaatccaggatctaattcaggatcacatctcgcatctattaatacctgttaaacctcattagtctcccttaatcaggatcagttcccaatggtaaattctttgtaaattctaagtagtgttttcccaaagaacttaaattcacagtaaaataaataaataaattaattaattaataaataaattaattatatggtgactcaggacatacatacaattatattttaaacacacacacacacacacacacacacacacacacacacagagttttagaacttacaaagtatttaaccatttacctagaaagttagttttaccaagtatgtttcaaactttcttgatggcaatccagagttaagagatatcttttatatggtagcctcttacacacgcgtgcacacacacacacactctctctctcaaataaaagtatcattaaattatatttaacccttatgccattcaatatactctgatattttctatgattctctatttcattgtttttaaattaatttttttttttttgagacagggtctcactctgtctgtcacccaggttggagtgtggtggtgcaatcgcagctctctgcagcctctacctcctgggcccaggtgatcctcctgcctcagcctcctgaggagctgggaccacaggttgcaccaccacgcctggctaattttttaatgatttgtagagacagggtttccctatgttgcccaggttgatttcatttttttaaatgtcagccacatgggctgggcccagttgtccacacctataataccagtgctttgggaggctgaggtgggaggatcgtttgaggccaggagtttgagaccagcctgggaaacacagcaagatcccagttctacaaaatataaaaataaaattagccagatgctgtggcttgtgcctatattcccagctacatggaggctgaggcaggaggattacttgagcccagcagtttgaggctgcagggagctgtgatcgcaccactgcactccagcctgggcaacagaattagacctcaactcagacaacaaaacaaaacaaaaaatgccagccacagtacagcaaattggcttcccaggtcttaatacacaggttgaaaagccctgagaaggccaggcgcggtggctcacctgaggtcaggagttgaggccaacatggtgaaaccccatctctactaaaaatacaaaaattagccatgcctgtaatcctaactactcgggaggctgaggcagaattgcttgaacccgggaggtggaggttgcagtgagcctagatcacaccattgcactccagcctggttgacagagcgagactccgtctcaaaaaaaaaaaaaaacaaacaaaaaaagaaaagcctcgaaaagccccgaattggtggatagtaaaccacttggtgcgcccttagaatattgcccagagaactctttccatggaagttgctttatttatttatttattttttgagacagagtctcactctattgcccaggctggagtgcagtggcgtgatctcggctcactgcaacctctgcctccagggttccagcgatcctcctgcctcagcctcccaagtagttgggattacaggcgtaggccaccatgcccagttaatttttgtattttagtagagacgaggttttaccatgtcgcgcaggctggtctcaaacttctgacctcaagcgatccgcccatctcggcctctcaaagtgctgggattacaggtgtgaaccatggcgcttggcctgaagcatcccctactttgtaaactgttgagtctctgcacctctgcagctccctgccccctgatactgggtaccctgtgcccactctgtgctctgctggcgcttggggcaacacccacctttcttcttgtccggggcctctcgctcagcaggccgcccacccccagacaggcggaaggagccctcgcgggcgaagctggtgcggctggcatcgaaggcggccgtgaccccacattccttctcccgtcgctgttttcgctccaggcaggcggcaaaagcacagcccacagcgtggctcagcctctcgccctatggggagaggatgggcgggggggttagaggcgctgggcagtgcggacaggggccaggggcactgggttatagccgctaggtactgggttgccccggatgagtctctgcacttctctgggcctcagtgctcatctgcaccacaaggaagggctggaaatgacagctccaagtgagagaagccagaaaccaatgagcctgttgtgtggctccacttactggaaattccagaagaggcaaaactaatctatggttctatggtgaaaaaaagtcagaacaggccaggagtggtggctctcgcctgtaatcctagcactttgggaggctgaggcgggaggttcccttgagcccaggaggtcaaggctgcaagcagctatgatggggcaactgcactccagcttgggtgacagagtgagattctgtctaaaaaaaagtcagaatagtggtagtttcctatggggtggggaatgactggaaagtgtatgaggggatgaccgggtggtggcaatgttctagatattgataggggtttcgttacatgggtgtatgcagttgtcgaaattcgttgactgtacaccaaaggcttgtgcattgctatagactaaacgtgtgtgtctctctcagttctaacgctgaagccctcatccacaatgtgctggtatttggaggtgggcctttgagagacaataaaagttatgttagatcatgaggtggggtcctcatgatggaattaatgcccttatttatttattttttttctgggacagggtcttactctgatgctatgctggagtgcagcggcatgacctcagctcactgcaacctccacctcccggcttcaagcgattctcctgcctcagcctctcaagtagctgggattataggcatgcgccaccacacctggttaatttgtgtatttttagtagagatgggatttcatgatgttggtgaggctggactcgaactcctgacctcgagtgatctgcccacctgggcctcccaaagtgttggggttacaggcgtgagccaccatgcccggccgggattaatgcccttaaaaaggaaaaagagacaagagatctcccctccaccttgagaggtgaagatacagaaagcaggcatccatctgcaaaccaggaaaagagccctcaccaagaaatgagccatttgacaccctgacctcaggtatccagcctctagaactgcggcaaacaaatgtttgtcatttaagccacacagtctacactatctggttatagcagcctgaactaagacaatcatatctttcgctttgaagaaaaaaaaaatctggaaacaaatacgaattctacttaatggtgtgcatgctgaagtagtccaatgcctacaaatttgacatacaaaaagaatcagacggtgtgactgcagtcgctcacacctgtaatcccaggaggccgaggcaggcaaatcacttgaggccaggagttcgagaccagcctggccaacatggtgaaaccccatctctactaaaaatacaaaaatctgccaggtgtggtggcgtgcacctgtaatcccagctactagggaggctgtggcaggagaatcacttgaaggttggaggcggaggtttcagtgagccaagatcgtgccactgtactccagcctggggcaacagagcgagactccgtctcaaaaaaaggaatgaaccactgatacaagcagctcacgcctgtaatccgagcactttgggaggccaaggtgactggatcgcttgagtccaggagttcgagaccagcctgggcaacatggcgaaatcccatctctacaaaaaattagccaggcatggtggcgtgtgcctgtagtcctagctactcaggaagctgaggtgggagaatcgcttgaacccaggttgcagtgaggcgagattgcaccactgcacaccagccttgatgacagagagagacgctgtgtcattaaataaattaattaaaaacattgccgggcagggtggctcacacctataatcccagcactttgggaggcagaggcaggcggatcacctgaggtcgggagttcaagaccaacctgacctgcatggagaaaccccatctctactaaaaatataaaattagccagctgtgatggtgcatgtctgtaatcccagctacttgggagactgagacaggagaattgcttgaacccgggaggcagaggttgcagtgagctgagattgctccattgcactccagcctgggtaacaagagcgaaactctgtttcaaaaacaaacaaaaacacaacattacactaagtaaagaagccagacacatattatatgattccattaaatgaaatatccagaataggtaaatccacagagagacaaagcagattagtggttgccagggggctggggtagtggggagacggggtgaattgatgaatggagatggggtctcctttagcggtgatgaaaatgtttcaggactgctaaagtcaatggttaaacaacactgaaaatgtattaaatgccattgaattgtacacttttaaatgattaattttatgtgaatttcacctcaagaaaaaaaaaaagttgaacttggggaattctactgcttaatggttaaaacttccttcagaagtaggaaggaattcatccaacatcacattctttacccacaggagatggtcctgctcttttctggctttcattctcatccccaaatagttttttttttttgttttcttgagacagagtctcgctctgtcacccaggctggagtgcagtggtgcagtcttggctcactgcaacctccgtctccagggttcatgtgattctccccacatgtgattctcctacctcagcctctggagtagctgggatcacaggcgcctgccaccatgcctgtctactttttttgtatttttagtagagatggggttttaccaggttggccaggctggtctcaaattcctgacctcaggtgatctgcctgccttggcctcccaaagtgttgggattacaggcgtgagccaccacgcctggccaatactcttttttttttgagatggagtctcactctgtctcccaggctggagtgcagtggtgcaattttggctcactgcaacctccacctcccgggctcaagtgattctcctgcctcagcctcccaagtagctgggactacaggtgtgcaccaccacacctagctaattttttgtatttcagtagagatggggttttaccatgttgtccagggtggtcttgaactcctgagctcaggcaatccccccgccccagcatcccaaagtgctgggattacaggtgtgagccactgcacccggccctcacgtgaatactctaaattgggaaccgtgagtatactttcttctccagatgaggaaactgggcacacagaggttagtgatgtgcctgaatgcaggaagcttgtaggggtggggctgggatgccagggcatgggagggaagagttggccagctgtggcaatactcacggagtccttcagtgccagaaaacagtggcagatccagcggcgggtagtcccgtcacgacagatataggagaaagccttgtccaggttgcggtcaggagcacaaaaggagaccttttcgatggtctggtcgaccagaagatcctaggaggggccggggaggccaggagaagagtgtgaactctctttcaagtgttcactcaacattctctctgtgtctgctgaaatccagtcctgaacagggtggggacccagcagtcactgagacaccctgtgccttgcctgcagagggctcccaggtcagcgggaagatcagacccatcacgagatgggcagcccagagtcatagccaggatgtgatgaaggaggcccaggcagaggggtcagggccaggaccatggaggcacaggcagaggggtcagggccagcatggcagaagccagcttggggtcagtcaggcaaggcttcctggagcaggtactaactaagaaaaaaagtcaaggaacagtattttgggctgagggaactgccttgcaaaggtggtgatcttgttctgttattaacccaactctcagcatgtcctgggcacctcctagggcagtctctgggctgggggcagcagattcaaggtgagcaaacagatacctagattgtggcctcatagtgcttccttctgactgggcagggtgacaataaacacttaatggctaacattcattgatctgagcagttacgatgtactagaccccatttaaatatatatatatatttttttcccagaaggagtcttgctctgtcacccaggctagagtgcagtggcatgatcttggcttactgaaacctctgcctcctgggttcaagtgattctcctacctaagcctcccaagtagctgggattacaggcacgcaccaccacgtctggctaatttttgtatttttagtagaggtggggtttcaccatcttggccaggctagtctcgaactcgtgacctcaggtgatccaactgccctggcctcccaaagtgctgggattacaggcgtgagccaccgtgcccagcccacatttaaatttttttaaaaattattttgtatagatggagccttgctatgtttcacaggctgatcttgaactcctggcttcaaggggccctcccagccaggcaccatttcaaataacttgcatatgctttctcacttaatggtagggtctattataatccctgtttttctgcgatggagtttagctcttgttgcccaggctggagtgcaatggcatgatctccgctcaccgcaacctccaagtctcgggttcaagagattctcctgcctcagcctcccaagtagctaggattacaggtacacaccaccatgtccagctaatttttgtatttttagtgagatgaggtttcaccatattgccaggctggtctcgaactcctgacctcaggtaatctaccctccttggcctcccaaagtactgggattacaggcgtgagccaccactcccggcctataatctgcatttttcagatgacacaactgagactcagagaggttaaatctcatgcccagggtccctaagctgggatcggagctgaggcagctgctccagtctctctcacccacagcctatgccagttcccaaataatcacagcatttattcctgagttatgacgacagagggagcacacggcatcgtctagaaggtccctgagggagggatgtgcagaggaggcgggaaggtgtcctccgccctgattccagcagggtgagcagacaggccccctggcgtccacccccacaggcctcctaccttggttttgtcgtccaccactcggagcccatcggctgacacccacaggacagacttcacggactttcggcccatctggagggaggcaaggggacaaaggagccgggtcagggtgcctctccctgtctgaccttgccccctccctcatggcagccccctcactcaccgccttcagcttcttcaccgcatcttcacacacgtgcattccccgggactcctctacctccacgtgacccaggtacttgggttggagggaatggggggggggacatgaaacagcacagtaatcactcattctcagtgtccactgagcatctgccatgcagtagacaatattttaagcacatgatgtgtatgcaatcatttattctgcatctcaactctacaaggtggagaccccattcctggtctagacatgcagatggggaaactgaagcacagcacgtagtagtgattccagtctagctatacccctgggccctaacccggcaccgtggtcctcccgagagctagtatttgcatctctgtgcgtgaggactggccacaggccatgcaaagctgctttgcctaccctaaagcagctagaaagagcctgggccagtccccacaatgactgaagggagttagggtacctgagccccagctccctcatctgcaggtgggatgactgttgcctcgagtttcccaggggaaagctcagttgcacactgctgcagttttaataacacaccctttactggctgccttactttcctcactcccaacaccatttcctgcacctcccaaatgaagccgtcacattcaaagtctgcttccagggaagggaacgtaaggtggtggaggggctgtgaccatggtcagtcatcacccagccaggaaggggctgagctccacagtccacgccgtgaatcctgctctccccctcacaggaatgtaaaagcgtagggtatggctaaaccagaacgtccttatcggtagagcgctttgcaaatgctacaccacatgacggcttccaggtaatagtttgctggtacaaaaaaatgtgttctggttttttgtttgttttcaagattgggtatcactctgttgcctaggctggagtgcaatggcacaattaaggctcactgcagcctcgaccttcctggactcgagtgagcctcccacctcagccttgtgagtagctgggactacaggtgcgtgccactgtgcctattttttgtagagacagggtctccctgtgtttgcccaggctggtcttgaactccttgactcaagcaatcctcccaccacagcctcccagtgtgctggaattacaggtgttagccaccactacgcttcaagtttttttttttttttttttgaaacagagtctgctctgtcgcccaggctggagtgcaatggcgctatctcggctcactgcaatctccgcctcccgggttcaagcgattctcctgtctcagcctccccagtagctgggactacaggcgcccgccaccacgcgaggctaatttgttgtatttctagtagagccggggtttcaccgtgatagccaggactgccggcctcacgctttttaacaccaacttcaaacgacttgggctggtgtcccagccaggccgcgcacccgcacagcacagcacagcggcccccgtccccctcgccccgccgcaccctgccgcgcccactcaccctgaccgggaagctgcacgtgcccttccgcaccgcgtcctcgtctgcctgccactggtgcgggcgcgacgcctcgggcacgtaggctggcttcctccgccgcaggctctgccgtaacttgttcatggtgcccgccccgtctggtgacacaggacagtgatgtgggtcaagggtgggggtcagaaggtatggagctcaacggggagggaccagtgctcagggagcatggggtcagataacaagataactggaagcggggttacagggtcagttggcagcgcacatgggatcagcagctcaagtcaggggacagtgaggaaaggagccaacagaagccaggggagtgcgaaagttgggcactggggattcagaaccatggggctaaggggctggaggtctggggtggggggtatggggcacaggcttcagggcattggagggcttcttgtccatgtggtggatgcttcctcattcccagggccgtgaggacacaaagggtgggaaatcagacgtaggagggcatgggggctagagggcatagaagtcaggggccgcacggtcaggggttttaggggtatgagagtcaggcagtggggtgatcagagggcagcagaggagttgggaattgcatgggtcaggggtgcaggagtcaggtgcatggggtatgggggatggtggcttgtctctggaactctgagacacagccattctgtgacaactgtgtctagtccccaggcaaggcttctggggccttgcactgatgactgtcagaggcagggctgtgggtgtgtggagtgggtgtggaggtggccagccactaggacagtcttcactgatcagccatcctgacagtcccaggactgggagcaccaacagcagagggggatgtgtgtgtgtgtgtgtgtgtaagcaagtgtgcaatggtatgttctggaacgctgtctatgaggggctctatatctgagcaggcaagtaatgtctgtgagtgtgtttctgaaggctgtctggaagaacgcatgtctgagaatggtgtaggatagtgtgcatctgtgaatgctgtccgtgagggatgcatccaaaagtgtggttgttgtctgtgagtctgaggccctgaaggttgttgctgaagggcatcgatgtctgagagtggttgtgagtgtgtgtctgctgtctatatccgagagtgccgttgttgtctatgagaacttgtggctcagtgcctgttgcctgtgagggtgtgtctgtgtttgagatgaggctgtcgtctttcaaagggtgtgtccatggctgttatccatgtagctatgtctctgtgtgaaggtgtggctattgtctgtgatgacattgcctcggagagtgcatctgagggatctacaagactgtctgtgtccaagagtgcagctgttggcggtgagcctgtgtgactgtggctgttgccttagagtgtgggtgtgtgggtattgcacagagggtgtatctgtgtgcagtggtgcatccgttagggtgtgtgggaacatgaggttgtctttgagagtgttttcatgagggttatttgtaagggtgtgactgttgcctgagagagtgctgggtgttctttgtgagactgtgtgcatgtttgtacacaaccgtagctccctgtgagagcctgggcccgcgggtgctgtctgtgaaagtgtggctgtcgtctgtagaaatgtgggtctgtgtgtgttgtcagactgtgcaagagtgtgtctcttttttttttttttgagacgaaattttgctcttgttgcgaatgaaggctggagtgcaatggcatgatctcagctcacagcaacctctgcctcccaggttcaagcgattctcctgcctcagcctcccaagtagctgggattacaggcatgtgccaccacccctggctaattttgtatttttagtacagacagagtttctccatgttggtcaggctggtctcgaactcctgacctcctgacctcaggtgatcctcccgcctcagcctcccaaagtgctgggattataggcattgagccaccacgcccggccaagagtgtgtctcttgagagtgtgtatctcagagtctgtatccagcgagcgtctgtggtcacctgtgaatctgggtgttgtctaggaatgtgtgtgtgtgtatatatgtgtgtacattagtgtgatgaacatctacttcagcatgtgttcaagtgtgtcactgcattagcaagtgtgtgtgatctgaaagagatctgtgtgtgtgtgtgtgtctctaaccgtatatctacagatgtgagtgtttgtgactctgcacttgaggctgtaagggtgtcagggtgtgggtctgtgcatgagtggggctctgacagtcgctgaggaagatgcctgagggtgtccactcatgagtgtgattaagcctgtgtgaccgcagggacagctcctctggtcgtgttaggcaagaccacatacccattcagccctgccctgtcccaggctggtcgctcacctggctccgtcctgcaggtttctgggggccccggggccccacagggggctgggggcaggtgccgctcaggcctccggggtccgccctgcccgagtaggggaggagaaggtgagaagtttgtctgggttggggctcagtctgatacttcaccccgactttggacttcggccagccccctccatcttgggctccctgatgagagtcctagttgtcctagcaactgttaccagggagatcagccacctggttccaagggcccaggaaggagtaggtatgtttggggggcatatgttggggatgtgctggcctcaggagagcctcactgcccaaggggatgctgtgagagtggccttgccctccagatgcatgtgcagggctacacacatacgcagccaactcatatctacaggtgtccctagcatctggccacagctttacacacttggttacacatagacgcaatcacagctacacacctcagatcgcagatacacagaaacagtcccaaacccagaaagctgccactgtaaacatctggccgcatattcatgttcggacacacacagtctctactacagacatttgtccacatacatgcagcatgtcctggcccactcagttcccaccgcagacacctggtcacaccacccactgaaatttggtcacttccacattctcagccacatacaaagaacggggcccagacaacccactagagccgcacatgcgtggccacacccagtgacagctatgtttcctcaggcacccgcccaagatactgacgtcacaggcccacccagatagaatcacacccagagttcacccatttgctgacccagtcccacacgacacaatcgcagctatatacacttgttacacgtatctccactgctgcacactgacatctggtcacagatgcacacggacagacacacatttggtcccacggagaccacatgcagcctcaaccagaccagtcacaccaacacactgtttttggccacacactgtcacgtggtcacacatactcagtcataggtgctcaaatctggtcacagcatcagtcacacagtctattgtgacagccacactcatagggacagtcctctatacacaaccacatacagaggtactgatggccacagcatgcaaccacccacaaacaactgtccccaaggatggcctccctcaagacacagccatggtggtcctataggcatggccacagcatcaatgtccatgtgacccagccacctatcatggtcataatcccgtcacccagtgtccatacacagctgtaccatgtcactccaatgcagcgaaacatatagcctttcttcatgcaggcacacaagtcacacagacaagtatgtggccatatagaatcacagccccgtgtggacaggtgcacaaagtcacaagccccacctacacacatatctcacacatagagacataagcacacagttttagtttcccatgtcacaagtacacagtccagtgtatgcacataaatgcagtgaccaggatgtggcatttatagctgggtttacacagaagacacaggtcctgacggagccatgtgcacagtcaggggccaatctcatcaccaaatcacacattctaacacaggtagtccagcacatacacacagagacaaaaacaggcacacagctacagaccccacactctcacagatgatgacatagacacagacatctatagtcacccagggtcagacatgcaggtcaaacacaataatatggaagccataatcatatacacacccctacaaacataatttcctggcaccagcacggagacacatccacagctttagtcacacacaaataatccctctaaatagccagggtttcagacaccaagtcaaatacataacccaaatcacacatgcaaggctagaaatacacacaatcactcgttatcacacacactgctagatacagtcatttatattaatacaacctcagtcacacactcagacatggttctgcatacgcaaccactgtcatacacaatactgtcacacaaccccagtcacacagatacaatgtgacttcagacacaatggcagtcacacaggcagagttgcacagacaggtgtgtgtcactcacgtatataaaatcaggtagagacacaactataaacattgtcagtcactgggagggtcacacatgcacatggagccatagacaactccactcacacacagtcacaactccacccacgtcctgtcagtcacacgcatgcccacccccagactcaacacatactgtcacatacccagttatagttaccgaggcatacaaacacagggtcacaaaagacacaatcacagacaaccacagtcacaaccatgcacacctccaaacacagacagactaaaaagtacaggattctgcacagtgagcagctgtcacacacacatacacagtcacacagatactagggtcacagacacaatcatagacaccaccacaagcacacacacacgacacaggattcctcagtcaccagctgcagcgtacgcgtgcacacacacacacacatacacagccacagtcacacaaacacagggcacactcctagccacctccccatcgcttgcttccccccttccccccaggtaccacacacaaagccgccgtcaccgtcaccgcagacactgcagacagacagggctgcacccggtccctggggagccgcccccagcccagcctgtatcctggagcctgagggccaggtccaggagggggaagcggtgcattgtctgcgggtggggccactcttggacagctgggcagccctggggacaaagggggtggcctagggatcctgtgccctgggacccatgaccaagccagggggtggagggattgggggttgcctgaaattgtccttattttattcaggctggggtggggtggagtcccaggcacagggaccttgttttgagaagtggctgtgcctgggactccgcccaaggattggggggatgctgtgcccagggtgcctctgagacctgggggcaggctgtgcttggagtccccctaggccttggcgtggtgggaacgctgtacccagtgaccccatcctcgagaccgtacctaggcagttgttgtgctgagacccccttaggcagggagaggtagggattgtgtctggaatcgcgtcctggaggccttggtttgatacgggggctgtgtccccgaccccatctccatccccatctagttctaggagttgtacctagaatctctgtacccctgtccttggttttgtggggggtctgtgtccaggatccctatttccagggccttggcaagagatggcccaggggtctgtgcccaagaccccggtctcctgggctttggcttgttgggcctgttcctggacccccacccgggaccaccctctccagccttggcaccctctctccatccgggcgccgcggccgcctcccaccctccgccacatcagcagcggcgccgcccccgacccgagcccccctctcccgcccttctcacgctggccgccgcgctgcgggacatccagggcccgggcgcccccgcctcccgcggccctggctgggcctggctccccgactgctgctgctgcggtggtggcggcggcagctcggtctgacgccggccagggcccggggccgggggatggtgcgggatgcacgcgcgcgagcctcctcggctcccgggaggattccgttccgggggcgggggagcgtccctcggcctcggctccccgccccgaccccgcccattggcccgccgcctgccgtatatgcagaaaggtcccgccccgccccgccccttggcctgaagaccccgcccacacgcagacaccatcccgccttccccggcgcggccaccgccccgccacgcccattggccagtcccgagctgagcatgcctatgaacatcgccgagtcctttcccccggtccgtcctggcctgggctccctttccctccgtgacacctgacctcagatcccctccagctccgcgtccgaaagagttgcttctagaggcgccttgccgccccacacccccaaatcttcccgctaaccccatggttccccagcccggcgggggcgggcaggagcggtgacgaggcactttttgcaaggaaggggagggggtgtgaacagaccaaggcgtcctgatgcgcgatcggttcggctttgggaacgggggcgccggggtgggaccagggcgcggttctggccgctacggcgcccccgccgccccctacgccaatcctgtgggtttggcaaagcagctggcagggacattagagcccattagtaaaggcgaggttgccaggagtgaggggagggagcccgcagccaagaggcactgtgtgtgtgggaggcctcagctgccacagcccttagagcaggtggtcagcacgtgggggggggtggggaaggcgagaaggaggttcccggcaacagatggcacaggcagggctgaggctttcagacaagggggtgcaggggggctggccatctgcacctggaggccgctggcgagctcctccccctctccccccaaccctagcgcagagaaaagagctgggggaaggggagggctgcttttattccgattgaagattcagctcccccccaccccgcacccctacctctccaacacactgagaggctggaacccgggagaaggcagctgttggaggagcgagggaggcagaggtgaggactgcctccaggaccatctcgccttccacgggaggcttgaggcagaggtgagggctccccctgatgagtctgatctgcataacgacatgcagcggcccaaggctccctcaaatgttggcaaagataagttaaccgcttccctggcttagttttcggatacccactttcgagtggggaggtgcaggatctagggcacgaagttgggagttccccagccccagggatcctgagctcctgggccaaggaggagagccaggcaagactgggaagcccaagggggctcctctgacccagggcagacggggaagggataagaggcactacagcagggtacggcctgctctggggactgaatcccccatggaggctgtcatgagggatccacccaggagtcccctttggtggggaggctgccggcagtggctgcgtctggctggcgactggcccagtagcggtggtaggtgtcctggaagaggtccctgcaggcgatgtgggctcggaggtgggcacaggccaggaaagcccctgccagcttgcggtgcagggcataggtctcctcgggtgggggacacagccggtgccgcagcagcaccgggatgaggtcctgtatgcggcgggccgtttcccccgacccaaagtcataagggccctgggtggcgaaaggctcccccaggatcatcactgcctccacgtgggcgtcggagaatgcctgggagtgggggtggggggagagcaaaggcagccagtgtggacatagagccctctgcataacccagaaacaacgtgtagcctccactccctccagtctccaccatcaacacaagccccgactcccccaagagtgagcagcttccactccttccagagcctggactagacaagcagctgcctattccccgagtaagcaccccttacttccctgcagagcctccaacagacaagtagccctctactctctctacaacagagaagcggccttcgcccctcctgaacagatccacggtgcccatgttcccagggttcctgagaagtcaggcagccacctccccccactcctccccaaagcccccagcatggataagcatccctcctagagtcacccactccccaggtatagacacacagcctccattctccctagtggagacaagcccctcctagagtcccccagtccccgggtatcgacatgccccatcacctactcgagttcctcagtggagataagcagccccccactgcaccccaccaacagacaccagcccctttctcccccagtgtctccccaccttggtttcaaagcctgtgaggaatttgaggtccctggacttctgcaggacacagtctctgtctccatcagctgcagccttcaccacctggggagacgggtgggagttagagggacaaaggccggggctcaagggggctctggagaagaggagctggaagcctgggcctcccatgtacccacctccattctcatctgcctgggccctccctcacctggaagcttcctgctcccaactttgcctgtctgtgactcccttaaagactcttccagagcctgggagtggaggtggttagggatcctgcccacctagagggcaatgtggggcctgcccgggaactgccacagtgaaacagtgcaagaaacaagtgtcagggctgctggtgagtccaaacactcaactggacgggtatgagcgtgacccagaactgcatccaaagttgccaggggccatctctctgtctcccacactggactttgagccccgtgagagcaaggatcccagttgggtttagtcgcacggggcacagggtctggtgctgaggaggccctgggtgaaccttgctttagcaaatgagcgtgtggagcagagcagctctccagccatgagctcacacacacagggcaggagttgtgggcatggagagatgcccagctggggccagctggctagggttccgtcccagctctgccacctgccggcctgttgggcctccactttctcatctgtgaagtggggatgccaaaagtgccttcctcatggggctgttgggaggataaagaaggtgatgcctgtggcctgcctggcgctgtgtctcatgcaggaagcaccgtaaatactataatctaccattattaagaggtgggcacgggggtccctatttcacagaaggggaagcagacccggagtagggagtggaaccgggtcacaccactcactactgggttgcccttttttgtgaggagggggattcgggattaattccattccctctctgctccccctgcccgagcatgtctggccatctgtcaggcctgtggtcctcagaagccagggcttttataaagtggcaaaggctgcaggcctgggtgggaggggagggtgtcagtggggagaagaagggtctcagctttgtgcctcagtggccggcagagagggccccaaggggcctgtgtgtaaggggttatcacctcctcttcctgttcctgtctcagaggtggccccaccagtccccagaccagacccctagacacctctgtccccaacttctagcccgtctgctcccatggactgccagctgggcatctcccagccacccctctgcccctctccacagctgccctgagctcccacccccaggcttagagaccacttcttattcagagggagttttcaaattctgactgcatcccttccctgctcaaatcttttccacggctccgcagggcacctggatacagtacgagctgtagagcgcagcctctaaaatccgcagtgatttgctgcagcctcgtcactgtgctgccccccgacctgccctcccactcagaatgggagcttcctttgggtgctctagggccttactactaccagtgtggtccccatacgggtagccctggcctcacatgggtgcgtgtcagaacatagcatcttacacccacctccagaccagaatctgcacttgcacaggatcaccaggcttcacatgcacatccaagtctgagaaatgctgctctaatgggactgtcccttatcactgcctcgtcttggcacatgttgtctatctgaaataccctccgagccttttcccagttggcccccctcatccctcaggtctcaatgctgacactccctcctccgggaagccctccttggctccccaggctggctcaggctcctcctctgggctcacagtgccctgcgcttcccccatcccagccctgtccatgctaggtcctcactgtcgcctcactgactatgagttctgtgaggaggggcctaggctgggcccaggtcactgctgtgtctccagctttgcctagaatagagctgggcacagaggaggggtcagaaaacatttagattggctgggcaggagggctcatgcctgtaatcccagcactttgggaggccaaggcaggaggatcacctgaggtcagcagttcgagaccagcctgggcaacatggtgaaaccccatctctactaaaaatacaaaaattagccgggcgtggtggcacatgcctgtaatcccagctactcgagaagctgaggcaggagaatcgcttgaacccaggaggtggaggttgtggtgagccaagatcgagccactgcactccagcctgggcgacagagcaagactctgtctcaattaaaaaaaaaaaaaagaaaagaaaaaaaaggaaaagaaaacgtttagattgatggctacatgattagaggacccagggcaaatgtccaatctcaacaacgaatgaaatggtattctctgcagcctctaagacaaactgaccccagtgggtgggagagacgagccaagtacgtgaggaaacacctcctgtagacagagttgcccccagggacacacacctgggctggacaccagggccctggacagcatggggtctggagaggtgacaagatggtcactgtgggcctttctcttaggagggagctgggcagtggttggaagcttgggctctggacctggaccacctgaatttgaatcccaagtctgctgtgatcttgggcacgtgacttaacccctccaggacccagttacttcatctggcctaaaacgggcctaaaaacggtccttttcgcattgtgttgctgtgtggtttatatcggttcctatacgtaagcactaaagatggagcctgacatattaagtgcttggtgtgtgctagttgctacgagtattactattatttattatttcttaattccagaaactgcatttcgccttcttactcctctgcctcagtatatggcttgagcctcagcctttcagaggccctggggtctgggggagactcacctcgatgtaatggtctgtgaactctgtcccaaactcccggcttgcaccaaagtccagcagggtcacctggaagcaaggaatggtgaaaggaatgctgggatcccattcacaccctcactgtctattggggcagccaggatctgtctccctccccatgaccctgcctgctcctgccagagtccctgcctggctgcctcactgggctcctggcctcatctcccgtttccaaccgaccccctagctgaaggcttttttttcttttagttctaattgtttatgcaataacaaattttagacccagaaaaaaaatccagagaataataaaagatatagaaaagtaaaatgaatactcacaaatcctgccacccagcctaaaatataaaatactccccatccggccacacgtggtggctcacacctctaaccctagcactttgggaggccaaggtgggtggatcatgaggtcaggagtttgagaccagcctggccatcatggtgaaatcccgtctctactaaaaatacaaaaattagccaggtgcggtggtgcgtgcctgtaatcccagctacttgggaggctgaggcaggagaatggcttgaacctgggaggtggaggttgcagtgagccgagattgtgctattgtactccagcctgggcaacagagtgagactccgtctcaaaaaaaaaaaaaaatactccccatccacgtggagcctcctgtgtatcccgccctgatcacacctcccccaggtccccagggtcacctctttcctacaatcattattaaattatttcctgaaattctcatttatgcatttctatattttctatgtatgtgtacagctgtaaacaatctagagtaatggtgtgcatattttcaaacttcacagaagtggtatttactgtcgttctcctgcaacttgtgctttttgcccagcatggttttgcgatttatccctgttgccatgtgtcgctccagctcagtcactcatttcacactgctgtgtaaggacttcgttgcgtgaatctatcacagtgcatttatctggctgaggaatactgtggttgtttctgattttttttccttctttttaaatatgtttattagttataaactctgttctgacatttttttttttttttgagacagggtcttgatctgttgcccaggctggagtgcagtggcacgaccatggcttactacagcctcaaactcccacgctcaagtgatcctcccgcctcagcctcctgggtagctgggaccacaggtgcaccccaccacacctggctaagtttgaaacattttttgtagagatagggtttcactacgttgcccagactggtctcgaactactgggctccagtgatcctcccacctcagcctcccaaagtgcagagattacattagtgagtcatctcacctggcctgtttctaatttttgtgctcaatgaacacctgtaagaatgtttctagggcagtagagtttgaactgaccacaacccacagtaagaaattgtttctactggtggctgggcgtgatggctcacacctgtaatcccagcattttgggaggctgaggggggcggatcacctgaggtcaggagttcaagatcagactggccaacatggtgaaaccccacctatactaaaaatacaaaattagctgggtgtggtggcgcacgcctgtagtcccagctagttgggaggctgaggcaggagaatcacttgaacccaggaggtggaggttgcagtgagtcgagattgtgccactgcactccagcctccattctcaacaagagcaaaactctatctctaaacaaacaaataaataaaattatatatatatatatatatatatatatatagagagagagagagagagagagagagtttctactgggcgttcatgcaaatgcacacaaaaacgtcaaacaaaagtgtcccaaggccaggcgcaatggctcatggctgtaatcccagcacttcgggaggccaaggcaggcggatcacctgaggtcaggagttcgagaccagcctggccaacatggtgaaaccccatctctactaaaaatacaaaaattagctgggcgtggtggcaggcacctgtaatcccagctacttgggaggctgaggcaggagaattgcttgaacctgggaggcggagggtgcagtgagccgagatcacaccattgcactccagcctgggtgacaagagcgagacttcatctcggggaaaaaaaagaaaagtgtcccaaaataatatggatccctcccatctgtgacatactgacatcatctattccataaaaaaaaaaaaagtgctggtggatcatgaggtcaggagttcaagactagcctggccaaaatggtgaaacctcatctctactaaagatacaaaaaattagccaggtgtggtggcgggcacctgtaatcccagctacttgggaggctgaggtgggagaatttctcgaaccccagaggcagaggcttcagtgagctgagatcgtgccattgcactccagcctgggcaacaagagcaaaactctgtctcaaaaaaaaaaaaaagtcctgttggaaaccaataaattgatgtcaggactcctatcacttggagttgggtaaacatatccctggggtatgaacctaggaggggacacagggtgtatgcacattgtggagaaagaagaggcaagggactagggctggagactccgtggggccacaggatgctcagcaaagggttcagacttgattctgagggggctgtgaagctgtaggagggatatcttgaccagatttgtgctttagaaagacccctctggggacaaaatggggatagaccactttggaaaacagttggcaacccctgataaaggtaatgatgtatccaccaacactcaagtctgcaggtccaaaccttcactacaggtctttgtacaccccctgccctctgctgggaacactctgctctctggatggttgtctccttttcccctgtcccatctcagccttttttttttttttaaatagagcccaggctggttttaaattcctggcctcaagggatcctcctgcctcagcatcccaaagtgctggaattacaggcatgagccaccatgctcagcctctggtctcagctttttttttttttctttggtgagacagagtctcgccctgtcacccaggttggagtgcagtggcatgatcttggttcgctgcagcctcgacctcctgggctcaagccatcctcccacctcagcctctcagtggcctcagctttaatggcacttgctttaagaagcctcccttaatccctgctcaccccacagtgagtcaggcactttccctgggatcccataacttcctgtgcctcccccaactccagcccccacccctctgcctgtgcctcccccatcccggtcctgacccatctggcctgtgctcctcattgtggttggtacgaaccactctaggtcatcgctgtgtggtgccaggtccccccactggactgggcactctgagaaggcaagggtcagggatgtctttttattgctgtcaagaggcaagggcaggtgatggtgtgttctgtatggatgacgagtgtggtagtgatggctaactgccttccaaaagctgtacttcccctctgtgctgtcacattgccaccaggaaccactgcctagccagggactccattttccagcatgccttgcacctaggcaggctatgtcactagctctcactgatggaatggcaacggaagtgctatgtccattgccccaggatgagcttagtgtatttagcctgggcattactttttccacttctggccaaagcagttaggcagggggctaccctcaacctctcttaccctttccttgggaagcagagcgttgcaaggccccagggatggcaaaaccacaaaagggaaggagctgggtccctgaatcccacttggaaaagggccacccctgcctattgtgggggtaatcaactgctattttgttgagctaccgaaatatcaaggaatatttgttacaacagcaaatgtacccagacacacatcactaggaaccaacctggtggctggaggcatcatacaggaagttggcccagttggggtcagtctgcatgaatcggaactcaaacagctcccgcagacacagcgtcaggagctggaagcaaatctggggtggggagaattaacaggcatctcagtgtgatctcccttgtggtgccactgctggcctggagagagaccatgagcctggcccacccgccctggggccatgcccttcccactgtgccaccagacagcatacctggttccgcaggtcctggcttaggccctggcactggtccagggggacccctccagccagctccatgcccagcacccgtgtcgtgcacagctccttaaccacggctgggacccggaagaaggggtcatttgccagcagctgcctggggcagaaggaaagggaggaaggggacttcgtgcttcaggcttgtgacccagcttgagacctcctccttgtgctctcagaagtcctccatgaacagtctgcgccatgccctccctcctgcccatctcttgctgctgtctgccctgggtgatgaccaacacctggctggactgagatttaacaagtatctccaaggtgcctactctgcacctgcctctcaactgggtgctgctggaaacccagtcaccacttccctacccgaaacccttctatgacttctggttgccccagaaggatgagttcaggtgtatttcagcctttgcattactttttcattaatttattaattcattcatcccaaaagtagtcactggtatcaaaatctgtgaagtctatagtgatacccatgggtcagtccttgcaatcactactctgaacacaggtaaatagcgggaaagaatcttctgtgtccatccttgtgctaaatgatgctggggacagagcagtgaatgaaccagtccctggacctggcccccaaccccgagaccacactctcacaaacagacggattatagattgaggtaagtgtgttggctgggtgcagtggcttacacctgtaatcccagcagtttgagacaccgaggtgggagaatcgcttgagcccaggagttcaagaccagcctgggcaacatggtgaaacctcgtctttatgaaaaactacaaaaattagctgggcgtggtggcctgcgcctatgttcccagctactcaggaggctgaggtgggaaaatcacttgagcctgggaggtcgaggctggagtgagctgtgatctcaccactgtattccagcctggaaaacagagcgagaccctgtctcaaaaaaataaaagaagtatgtctatgtaagatttgggaggcagagaatatgagcaaggtctctggttgaggatccgtgggatggctggaggagagtgagggagaacaggagggtggtgtggggttttatcctaagggcacccgggaatcctgtgggggacgggggggtctctggcccatcaccccacttcacactctcttccttgagctcctcctttggggtttgtatttttgtccttgttgataaaaatctctgatgtttgaactgctcctcatgaaccggagccatgtggggcatttaatcggcacactcccctttcatcctcactccacagtgaggggatgctctctggaggccactgtacagattgtatggatgcaggccacgtaacctgttaagggctgacccaggatttcatcccgcatctgagtctagggtgtgtgcctctaaccactgccttctactgagctttcactctctgtctacagagcttggcacgttttaggctgtcaataaatgtgtgagccacactgtggaggaccccactgaggtgccattaattgctacacatcaggatgcttccaagatataaccacattgttccacgtagccatagttcatgcattttcactgctacgtaatattccacagatgaatataccgttgcttatttgtccaccctgctggataaacttgatggatatgggttgtttccagtttggggctgttgcagacaagcgttctagaacagtctgatgatggatactggcaaaagggtccctagagtgttcagcagggagggcaatcgttggcttgcagagttcttgaatataagggcttatgtgatgatgccaacctgttctcaaaatgcttctaccaccttctcccacaacctgcagtgcagaagggatgctgtggagcccactctctctacctcccagtgctgtgggctccttgctctccgtcagtccagcagaggtaagagtgtgtcattgtgtaattaattaagtgcctgtgtcggaccacagtggatatgcggcccatctgacacaggagaagactgccgcttgggaagtgacctgcccaagctcacagaggacaaagggggtaagcgaagtgatggatgagtggaaggatggatgaacaatgattgaaagaaagagagagtttgccctaccccacagctccagctgccagaagctgagggggcagctacttcccacccagcctgggagggagggaaggagggaagctcagggcactcagctcacctgaaattctgggcacaagccgcctcacgacggtagtcacactcccaagccagctcctgctgcaaggcctgcaggctctgctcggcaaacaggcctgtgggggaggtgtgtcagccagggaagggccccgagcgcccactggtggatgccttctcctgccaaccctctctctcctgtctcccgcgctgtccctcacagctcctactctaggcctgtgacccacatctgtccctctcctgtctcccacgcagctcctgctcctgcctctgacctgcatctgtccctctcctgtctcccccgctgccccttgcagctcctgctccaggcctctgacctgcatcgtatcatctgtctacacatttccctcgtccttcatagcaccacagggttccccggggtcttccgaagccttttctgggctctgtctcttgcacatgcctgcaccccagtccctggcagctctttcagagtcacgcctgcctctattctgtctccttttcatactgactctcacgttgctcactgcatctgaatctcacttctgggcctggctttccctctccctctccgtctcttacacaaacacaacccaccctcctttctctaggcgcctcctcacgtgccatccccaggactgtccttttctgctctgccgcacctacaatcccgctccctgcatgcacaccctctgagagtctgctgctgtatcttggccctgggctcccgtctctctaaggctctgttaaaatccataaggcttttcccacacctgctcatgctccctgggctctccccgccttggtgtcctttctgtctctgacactcccgctcacaacgccagcacaccctgcccgtgctctcctctgggctccccctcctgctttctctctctgggcatagcccctttgggaggtcagcagaggagtgggtgggcgcctcacccgcgggcagggccgcgctcatcttgagtaccgccagcaggttctggacatcgctctgaatgctctgggctatgccggggtactgtaaagggagaagggagggagagaaggtgggagtcacttctctgggctagcagggtgcccgcccctaccctgcccagcctcccctctcacctggatcttcacggccacctccgtcccgtccctcagcaggccctggtgcacctgcccaattgaggcagcggcaaagggcacctcctccaaggaggccaccttggcctgccagtccctgccgagctcctcttcaagaactctctgcggggagtggtcacagccatcatcattgtggcagagttcattccccaggctgagtgctttacgtgttgataaccccagcactcaccacatgcagggccctgggctaagctcttggctgccaccccctttgcagatgaggaaactgaggctcagagagagctcccttgtgcaagtgactagccaggcactggcagactgtgaggctcagcctagcctgtgtcccctgaacctggactccctgggctgttgtggggattgctattatttatagttaagactcataacaatcctttttttttttttttttttgagacagggtcttgttctgtagcccaggctggagtgtagtggcactctcacggctcactgcagcatcaacctcccgagctcaagccatcctcctgcctcctgaatagctgggactacagatatgtgccactgtgcccagctaattattactgttattatgtttagtagagacaaggtctcactatgttgcccagggtggtctggaagtcctgagctcaaatgatcctcccaccgcagcctcccaaagtgctgggattacaggcatgagccattacacgtggccaaccatcctttattatgctcttatatgttattattaactcacagttactgtgatcaagaagagctaaaatttacaatgggcttcctgtgggccaggtcctattcagagtggcccagagagaggcagtacctgcctggggccgcatggcgaataagcagaacagggatgggagagcaggtgggtggcggaatcctggattccatgccttacccagttattagaacagctcatgtcctgggcacttacttggtgccaggcgccgtgccaacctattacagacacgatctcctttaattaaaaaaacagtaataatcacagctaacacctgcatgttgctcacagtgaatcaggggccgttctcagtgctcagtgtaaactgatttatgtgaccctatgatgtgggtgtggctgtcactatcgccatttcccagggaagggaactgaagcacagagaggtcaggctgctgttccctgttttaatcaccacagcaatgctaggaggtgtgtactctggtgattcccattttacagatggggaaagtgaggctcagaggcagggagtggggcagtgaagccaggaaggtcaggcaggtcagaggagatggagcctgcctccctcaccgccctcccccactgggcactcaccagcatctgccagcggggcatgaagtcggcgctctggcggacccgctcaaagatgtgctgcagctgagggctgatgaagctgttgtcttgggagacagtggaaccaggggggaagtaagcgaagaggtgaggagggaccccgtgtgagtatctgaagttggggcctgttggtgggtagggctggggtagaagggaggtcaggggtcaggagtcgagggtcatgctgtaccctggatgctgagcatctggccaaccttgagggcggcccctcgaactgtacataaggtctgcacaatccgctcggcattggcctccgacaggaaggggctggagtccagcccagaaccaccctctggggagagaacaaccattagaattataaccacaaatatcatcactgcggccaggcccggcggcccacgcctgtaatcccagcactttgggagacccaggcgggatgaacacaggagtctgagaccagtctgggcaacagtgacatcctttctctattaaaaaaaatatatatcatctgcacaccaacaggaatggctaaaacgaaatacggaggccaggcttgttggctcgcgcctataatcccaacactgggaggtcaatgcaggaggatggcttgagtcaaggagttccagaccagcctggataacaaagcaagaccctgtctctaattagctgggtgtatggtggcatgtgcctgtagtcccagctactcaggaggctgaggcaggaggattgcttgagccctggaggttgaggctgcaatgaactgtgatcgcaccattgcactccagcctgggcaaccaagcaataccctgtctcgggaaaaaaaaaaaaaaaagaaaagaaagaaagaaaaataaacataagttaaaacaaattgcaggagagtcaaagagtaactactacagtattgaatagatgagctatcactacacacaacagcccaggtgggtctcaaaaatgtaatgctgagtgaaagcagccgggtgcatgaaatcatcacccagttacactgatataaagagcaaaacaaggccaaacaaatccagggtccaggagccaagacagaggtcacccttggtgaggggagtgaccaggtggggacatgagaagggcaacgattctcgaaatgtgggccagggacccctgagggtccctgagaccattcagaggggtctgagagatcaaactatttttatcgtaacattaagatgttattttcccctttctgctctcatgcgtctaagaacattcactggagttctccagaggctccaggacatgtgaggacaccatcagactgacagctgatggaatgtgtacgtgtgtactcttgtgttttaaaaatatctctgtatttttgttgtgtttttgagacagtgtctcactctatcacccaggctggagtgcagcggcacaatcatggctcactgcaacctcctgggcccaagtgatcctcctgccttaacctcctgagtagctgggactacaggtatgcaccaccatgcttggctaatatttttactttctgtaaaaatggggcctcgctatgtcactcagactggtctcaaattcctgacctcaagggatcctcccgccccagcttcccaaagtgttgggattacaggcgtaagccaccgcacctggcctaaaaatttctcagttttaatttctaatatggtagacattgataactataatccacataaataagctctttggaggctcattctaacagttttattgagaaataattcacatactgttataattcaccatttaagttatataattcaatgattattagtatattcacagagttgtgcaagcatcaccagaatcaattttaggacagttacaccacgcaaaaaagaaacctggctgggagtgctggctcatgcctgtaatcccagcactttgggacgtcggggcgggatcacttgagttcatgagtttgagaccagcctgggcaatatggtaaaaccctgtttctacaaaaaatacaaaaattagctgggcatggtggtgcatgcctatagtcccagctactcaggaggctgaggcaggaagatcacttggacccaggaggtagaggttacagtgagccgtgatcccgccaccgcactccagcctgggtgacagagtgagaccttgtctcaaaaaaagaaaaaaaaaaaagaaaccctatacccattagcagtcactcttcatttcccccaatctccccaggccttgacaaccactaatctactttatgtccctacagattttcctattttgtacatttcatattaatggaatcattcaatatgtggtttttcagtgtgtggttgcttttacttagtgttttttttttttgaaacagtgtctcgctctgtctccaaggctggagtacaatggcatgatcttggttcactgcaacctccgcctccccggttcaagcaattctcctgccttaccccccacccaagtagctggggttacaggcacccaccaccacatccagctaattttttgtatttttagtagaatcaggatttcgccatattggacaggctggtcttgaactcctcacctcaggtgatccacctgcctcggcctgccaaagtgctgggattacaggcgtgagccaccgcaaccggcctcacttagtgttttcaagattcatctacattgcagcatgtgtcagcccttcattcctttttatggctggataatattccattgtatgcctatcacattttattcatccattcatcagttttaaaggtgtgcagggatcctgagaccaagaagtttgagagcagctattctagggtttcttactctgggtacggacaaatgtactttgtgaaaacgcaccaagccatacacttacaggtatgtgtacctgggtttatatgcaaattacatttcagctttggcaaaacatttatttttctttttttaatatgaacactttatgaatttatgtgtcatctttgcacagaggccgtgctaattttctctgtctcattccaatttttatttatatgtgatgctgaagcaagcacagcacaacaaagcaattcttaagcctttattaattttgaaggccagttgtggtggctcacagctgtaatcccagcactttaggaggccagggtaagaggatctcttgagcccagaagttcaaagctgcagtgagccatgactcaccactgcactctagcctgggtgacagcaagactctatctcttaaaataaaatttaaaataaaataaaatgttattgagctcattattgagctgttccaggcagaatcctaagtgtctttgtggattctctggctgaatgcccacaatcacacctggaagtaagaattatcaatcctttaattttcaaggtgagaaagcaagagactcaaagaggtgcagcacctatccctgggtcacatagcatggaagtggcagagtggggtgtagactcaggctggtcatacccaaaccctaatcctccacctaccctcaactttttattttgaaaaaaatatccaggctgggtgtggtggctcatgcctgtaatcccagcactttgggaggctgagcagggaggatcacttgaggctaggagttccagaccggcctgggcaacatggcaaaaccttctctctacaaaaaatacaaaaaattagccaggcgtggtggcacgtgtctataatcccagctatgcaggaggctgaggtgggaggatcacctgagcctggggaagtcaaggctgcagtgagccatgatcgtaccattgcattccagcctgggtgacacagcaagaccctgtctccaaaaaaaaaaagacagaaaaaaatccaaacagaaaagttgcatgcataatatcgtgaacacctgcacacccgcacaccctccacctcgattcaacatggtaccattctgcttcgtctgctttatctgtgcgtgtacccacacacttactattattattttttgctgacccacttgcatgtagttgcacttaagctttgctaagaataaggatattcccctacacaatcacagtaccataatcacatgtaagaaaattaacaccaattccttaacatctgccatgcagtccatattcagattttccatttgtctccaaaaagtctttcatggctgttttttccaaactgatatgcaatcatggttcagatgctccatttgtcaaataatgtctctttcatctgtttttaatctggaatatccacccccacttgtttcaagacattgacttgttgagggaacctccacctaccctcaactttttattttattttttataacggcaaatgctacacatctaattccatctctgatgtacacagaccctcgctggcacttctattttcagctttctgctcctgctccaagttaggaactcccaatggcttaaatgttttctcagataatctaatatgtggctgggcacagtggctcatgctataatcccagcactttgggaggccaaggcgggtggatcatgaggtcaggagttgaagaccagcctggccaacatggtgaaaccgtctctactaaaaatacaaaaattaaccaagcgtggtggcatgtgcctataatcccagctacttgggaggctgaggcaggagaattgcttaaacctgggaggtggaggttgcagtgagccaagactgcgccattgtactccagcctgagcgacagagtgagactccatctcaaattaaaaaaaaaaaatctaatatgcttctcttaatcatgaccctgatagtggtttaggcctgttcaaagcacttcacaatgactctaagaggtgggtaaattatcaccacctccatcttccgcatgaggaaactggagctcagaggggtgaagtcacttgccccaggtcacacagcaaagccaggatctgaacccaggcagtgtggctcactcacctgactgcagacgacctcctggcatggacttcttagccatctcggccagtactcctagccccaagcccacagccagtcctggagtgcaagagaagaacatgagtgcccgtttgcctggggtgcccccagcctaacccactctcctttctcagtttttctccaagaatgcttgtctcccaactctttttattttttcttttgtttgagatggagtctcgctctgttgcccaggctggagtgtggtggcacaatcttggttcactgcaacctccacctcccgggttcaagcgattctcctgcctcagcctcccgagtagctgggattacaggcacgcgcccaccacgcctggctaaattttttttgtatttttagtagagacggggtttcaccgtgttggccaggctggtctcgaactcctgacctcaggtgatcctcccgcctcggcctcccaaagtgctgggattataggcatgagacaccgcactcagtcttgtctcccaattctttgtatctctgtttccaaatcagtctctgactctgttcctgcatggggctccctttaaggtgcagcttcctctttctttaaccctttctccatgtctctgtctccctcccagcagttctcagccctggctgcacattccagttaccagaggagctccggtaaatataatgcccagactccactccccaaattctgattaaattggcctgagacatgggaatttgtgttttgttaaaaagcacctcagataattctaatgtgcgatcaaggttaagaaggcccctcggccgggcacagtggctcatgcctatgatcccagcactttgggaggccgaggtgggcagatcatctgaagtcaggaggtcgagaccagcctggccaacgtggagaaaccctgtctctactaaaaatacaaaatcagccgggcgtggtggtgcatgcctgtaatcccagctactcaagaggctgaggcaggagaatcgcttgaacctgggagacagaggttgcggtgagccgagatcacaccattgcactccagcctgggaaacaagagagaaactccgtctcaaaaaaaaaaaaaaaaagaaggccccgaaacaattgtcctaggtccctctgtcttctggtgactcttctttctctgtccacacctcctcttctttatgcttatctctttttctttttagagacagggtctcactctgtcgcccaggctggagtgcaatggcaccatcataactcactgcagcctcaaattcctgagctcaagtgatcctcttccctcagcctcctgagtagctgagaccacacgtgcataccaccacgctcacctaattttttattgagacagggtctcactatgttgcccaggctggtctggaactccagaactcacgtgatcctcctgcctcggcctcccaaagtgctgggattacaggtgtgggctaccaggcttgacctctccctttctaagccagttatttctgcatctcttgccttctccccatttgtcctatctatctagatctctttctctcttttcctccctttgatgttatctctccatctctgatttcctctgctacctctcctcttgtccctaaagacgtctcgggtctctctccttcttttgttgtcaccatctctgtcaattaccatatctggcattttctgtgtcctttctacatgtcaggggctgttcccagtgccttctgtgcacttactaatttttgtccttacatgaggtctccaccttcataaaatgtattttacagaaaacttccattttacagaaaaggaaattgaggttcagagaagtgaagtaatttgcccagagtcacgtcacaaagcgaggacacagcagagtcatcccttaatccctgggcagcctggtgccaaagctctaaccagtgcctttgactgcctctgcagactgtgaatctatctatgtatatatatatagattttttttttttgagacagagtttcactcttgctgcccaggctggagtgcaatggtgcgatcttggttcactgcaatctctacctcctgggtacaagcaagtgaatctatatttttaaaacttgaaccaggcggggcatggtagctcacgcctataatcccagcactttgggaggctgaggcaggtggatcacgaggtgaggagttcgagatcagcttgaccaacatggtgaaaccccatctctactaaaaatacagaaattagcggtcaggcacagtggctcacgtctgtaatcctggcactttaggaggccaaggcaggcggatcatgaggtcaggagatcgagaccatcctggccaacatggtgaaaccctgtctccctaagaaaaaaaaaaaaaaaaacaacaaaaaatagttggacgtggtggcgtgcatctgtaacccccgctactcaggaggctgaggcaggagaattgcttgaacctgggaggtggaggttgcagtgagctgagatcatgccactgcactccagtctgggtgacagagcaagactccatctcaaaaacaaaaacaaaaacaaaacttgaaccatgatcagcaataagaagacatttacgttataaccagtgcagaccaaggtatatgtttcacgaaacaagactttcccttgctctacaggtgcatgcatattttctgtcctattcttctttttaaatgctggttgcaacccactaaattatttcatgtgacttgcacgacatccggctgtgtaacccaaagtcaagtgacctcccctttgttagcctcaatgtcctcatgtacggaatagaacactcattgattcagtgcagcatgtgtgtatatgggacactgcacattacaggttctcagtaaatgttattatggccaggagcagtggctcatgcctagaaccccagcacttcgggaggccgaggcaggaggatcgcttgagaccaacttgagcaacatagggagaccctatctctacaaaaaaatattttttaaattacccaggccaggcacagtggcttcccgggcaccgtggctcacatctgtaaatcccaacactttgggaggccgaagtgggtggatcacttgaggtcaggagttcaagaccagcctggccaacatggtgaaattctgtctctactaaaagtacaaaaattagccaggcggccaggtgtggtggctcacgcctgtaatcccagcacttgggaaggctgaggcaggcggatcacaaagcgaggacatagcagagtcatcccttgaaccctgggcagcctggtgccaaagctctaccactgcctgacaaacatggtgaaaccccgtctctactaaaaatacaaaaattagccgggtgtggtggatgcatgcctgtaatcccagctacttgggagtgtgaggcaggagaatcggcttgaacccgggaggtggaggttgcagtgagccaagatggcgccactgcactccagcctgggtgacagagggatactccgtctcaaaaaaaaaaaaaaaaaaatagccaggcatagtggcaggcacctgtaatcccagctactcaggaggctgtggcaggagaattgcttgaatgtaggaggcagaggttgcaatgagccaagacggtgccactgcactccagcctgggcaacagagcgagactctgtctcaaaggaaaaaaaaaaaaaaattacccgggcggatggtgcacaactgtggtcccagctactcaggaggctgaggcgagagaattgcttgagcccagaagtttgaggctgcagtgatcgcgccactgcactccagcctgggtgacaaagtgagactctgtctcaaaaaaaaaaaaaaaaattatcatttatgttcctcttgatttctcttggccttgcaggcccttgcctttgtctctctttttttgtctctctctctttcctgtctctgattcatcctctcccttgcttcaatctgtaaatgttgccctttctaattgaggtcacaccaagatcccccaaagtcacacctacccccaaagttggccaagcggctgatgcgggaggcaggcaccttgcgttctcgagagcggtcactcagctgggaaatggggacaaggtctgagggtgggaaagtgggcatcgtggccagagagtgcagccactctgccaccacacccttccccaagctcagggggccagcagtattcgtggggtgttgctgggtgggtgggggtaatgatacctggggccggggtgtcttcctgggacgggcctcccgtgccctgcgaatgtcctcctcacccaggcctctcccaggcccatcctggtaaaacttttgggcccaagaacctccacatggtccctgcaagagatatactttgataaggaggggaggacatgggatcacctggcccttctggacccctcctgtccttttaccctctgaagtctccctcagcctcttccccttggggacctgctccctagcctcttacccagcggtggggcccaggccccagggccccacaaggccaaccaacagtctggcccagctgtccaccggtcccccgaagtaggccccccaccttcagccacattgcctggaggagaagaggagggattattcaggtgggagttgcctggcttcttggccaggcccccatgttcctctgtgtccaccctctctcattcccacccactaaatacttcctccactattaatagattcccacagtttctcctggttctcccctggttgctaggaacccttagctcttcctgcaggcctcccaaaacccactttcccccctctcccaaccctcgccgttgctagggtccgcccccgttactagacacccacagttcctcaggggctacctctccacttctctgaaacccccctcgttgctatgcaccgccttcccctctgttggccctgtaggcacccgcaattcctccggtgtccccccgcccgatccccaccccgttactgagcacctccccccgttgctaagcacccactgctctcagcctccgagtccgcaacctgctggggccctcctgtgcttccgggagcctctgtatgcccgcccccttcggccagccaaccaatggcgcggcagcaactcgctgactggcacggagtttctccatctgtgcgcgggggaaggggccagagagaggccctagcgatggagcctggaattaaggtgggcatcgggggcccatctggggggattgctgaggcatcgcgggagcgcaagcgtgccctgtctgcccttccactcacctcaaagtgccttgtacgcgacagacccttctgttccctacactttcttgcaaagtctcccttacaaacctgacgcctctcttctgcacgaatatcttgccaaccccccttcttatttttacccctggcaggctcaacacaattcctttgaatacacattcttcccagcaaacatttcccttgcacatggagcccctccactttgcacaaacacccacattctggcacccaacctccttccttgtgcatataaatcccttgccttgcttgccaactgtttcccgctcacgccttcaactctctcgtgtacataccctcccccccacttgcacactgagtctctgttccctcacacaccctgttctctccgctccccgcccacctgcggaatggtgcgactgggagccctctgcttcctgtaggcctgacatttcccagaacacactcagccaagattcccagtgctgagtcaggaaccttggcatcccagaaaaccacctcccatcctatctttctttctctgtgtgtgtgtgtgtgtgtgtgtgtgcgcgcgcgcgttggaaagcctgctctccccacaacaggctgactcacccacttctcacagtctggaatagaggcatctggttggggcatctttcccaccactgggagagggagggatgccgatgcttcccccacagaaccccgctgccccaacccctcttgtcgggaatcaggcctctttgtctctattcccgtactgtgtgacctcagaaaagccctcatccctctctggacttctccttcccaacctgtatgaggtactaggtgggctcctgccttcgatttctctcattggtctgtgaaaaggtgactcattttagagccttggacctgtgcccaatgtctcccccagttgactcaatttcaagacaaaccacctcctctcccccttcagaggtgaacggctgactcaggagctgggtggcagctcagccttgggggcaaaatatatcaaaatcacctaggacaataaataatcctactgggctacaactgacagtgccaggcccggggccacatgcttcacatacatgagatcatgtcagatagccccgtagctgcaagcaaagggtagaggccggcagatctctgagcctctgttctcacgtgtaaaatggagccctggcatccctattgttcagccttggagaatgaactgaaatcgtgtcagggtctgatacagaacaagtactctatacatgacagagatttcttacggaaaatccaatggagcgtaagtcatttgctcagggtagcggagctgggaactggcagaggaaggtctcgaacccacacccgtgggaactccaagtctttgaaagtccgtcccgcccctgcgtgaagaatgggcgcgcggctggactcgtcaccgggggttttagggaaggttgaacttgtcattcaaccgtgtagggagggtggtttagtcacaggggtggagggagggggcccactggcgcgccaccaggaccccggtgccctagatgcatacctggccgcgcttcggatgctcagaggcaaaccccctccccttgggaggcggagtcggacaaggctccgtctcgttccgttccgtcacgtccggtggggcggggcttcggggctttcccctttgaggggagtatcggttaacccttgcgcggcggggcgggctggagctccgcgggccggaacccgggagtcggggctccccagccacacccctcgcgggatttaaagggataggaggggccgggtcggccgaagcccgaaccgaaggagcgggcatgaggcgctgcccgtgccgtgggagcctgaacgaggcggaggccggggcgctgcccgcggcggcccgcatgggactggaggcgccgcgaggagggcggcggcggcagccgggacagcagcgacctgggcccggcgcaggggccccggcggggcggccggaggggggcgggccctgggcccggacagaggggtccagcctccacagcgagcctgagagggccggcctcgggcctgcgccggggacagagagtccgcaggcagaattctggacagacggacagactgagcccgcggcagctggccttggagtagagaccgagaggcccaagcaaaagacggagccagacaggtccagcctccggacgcatctagaatggagctggtcagagctggagacgacttgtctttggacggagaccgggacagatggcctttggactgatccgcacaggtccgacctccagtttcagcccgaggaggccagcccctggacacagccaggggttcatgggccctggacagagctggaaacgcatgggtcacagactcagccagagagggtcaagtcctgggctgataacctctggacccaccagaacagttccagcctccagactcacccagaaggagcctgtccctcaaaagagccaagtgctgatggctcctggaaagaattgtatactgatggctccaggacacaacaggatattgaaggtccctggacagagccatatactgatggctcccagaaaaaacaggatactgaagcagccaggaaacagcctggcactggtggtttccaaatacaacaggatactgatggctcctggacacaacctagcactgacggttcccagacagcacctgggacagactgcctcttgggagagcctgaggatggcccattagaggaaccagagcctggagaattgctgactcacctgtactctcacctgaagtgtagccccctgtgccctgtgccccgcctcatcattacccctgagacccctgagcctgaggcccagccagtgggacccccctcccgggttgaggggggcagcggcggcttctcctctgcctcttctttcgacgagtctgaggatgacgtggtggccgggggcggaggtgccagcgatcccgaggacaggtctggggtgagtgggacccatcctgcccttgagccacatcacgcaaaactccttattcctccgcctttgcttaggaagttctctacccatttactgttagttgcccaccagcaatttcatctccgggaacctcttccatccactgacctcctccctctgacagccaggttactaattcactccaggcaccccttcttaattctctcctttccccttcctgcactgtctccactcctgggggtctacaatggagggccactgaccgactttatggggcccaggaacccctgaaattgtaggactaaggagcctgccgtgcgtgttcacatacattgttgcagcgacggtctgacatctgtctaatcctctggaatctgaagaacactgggatagggagacaggcagggtgcactttctaccccacatttcttaatctggggcctgtggctgtcttaaagggtcacaaaccttcaccaccccttagcctatttgtatgtacatttttctagggagcaaagcgattcccccagcttgcatcagattcgcaaaagggctgtgtgaccccaaacgccaaaggatccttggcctagccgggagcccacctggtctcccctgtgacccctacatccccaaggagccccctgaacactcttgtttactttgtccaccgtcacccccagcttgggtgtggctctcccctggtgaatcaggaggaccggccgggcaggttcagggagggcgggacagagcagaggccggtgtgaaactggagagcctcacgtggggctgggagccgtggggctgggagccgagtccggagtccatcagcttgccagcttgcctgctgaggcctctttttgctctggggcccctggctggagtctgccctgagccccgcttcaccccacatgccttccttggggacgtgttcacacatgtggccctagctgtgagagacagacctgccttgacgtgcctgtgcctgtgtgcaggggctgaccctcctgggccccattgcttttttctctctgcctgccctctcacttccttggcatctcagaacagctgagctggaagtgggtgaataataataataataataataataataacaacaacaattagcactcactcatgtttagccctgtgctaagtgctgtgcttttattaactcactcactcctcgcagcaaccctaatgaggtagatactttttttttttttctgagacagtctcgctctgttgcccaggctggagtgcagtggtgccatctcggctcactgcagccttcacttcctgggttcaagtgattgtcctgcctcagcctcctgagtaggtgagacaccaggtgcccgccaccacacctggctcatttctgtattttgagtagagacagggtttcatcatgttggccaggctgacctcaagactcctgacctcaagtgatccacccgcctcagcctcccgaagtgctggaattaccagcatgagccactgcacccggctgaggtagatactattattatccccttttacagatgaggaaactgaggcacagagaattcaagtcacttgtccaaggatatcaccttgcaagatgcagatcaaataattctaatccttactgtacaccagacactgttttaagttttttcttcttttttttttttagtcttttttgtcaatttttttctgtcattttttatcttaaaatagcatctatcttaattaagggctttgtatgtgttaactctgagtccttatgacagcactgagattgtctccattcaacagatgggggccaggctcagtggcccaagcctgtaatcccagcactttgggaggccgaggcagggggatcacctaaggtcaggagttcaagaccagcctggccaacatgatgaaaccctgtctctactaaaatacaaaaattagccaggcgtgtgatggcgggcacctgtaatcccagctacttgggaggctgaggcaggagaatcgcttgaatgtgggaggcggaggttgcagtgagccgagattgcaccactgcactccagcctgggtgacagagcaagactcggtctcaaaaaaaaaaaaacaaaaacaacagatggggaagctgaggcatagagaggtgagagattctttgcttagggttggccacgtcaagtcagagccaggattctaactcagttctggctgagtttcaaacccatcgtttaaaccctccagtgtgtagatctgttcctaacttgtctccctcccaggcctccctatctccagtttttttctcatccttccagaatctgcctccatggcccagctttgtctgctcaggtgccctctctgagagcagtcaggggctcagtgctgcgtttggagcctccggtctccaggcgccttcccagaatcgacttccttccctcctcctgaccccctctgctgtaactaggcctgagtacacactgttccttgaacactcttctgttgtcctgcctccacgcattgctcaagccgttcccactgcccagcatacccgtgcttccttctcccttaattttgaaatcctctctgaccgtaaaggctcagcttcctttctccctttcctccttccttccttctcaccatcctgtcctttttttaaaattgtgttctctttctttttctttttttggtagggatggggtcttgctatcttgcccaggctggtcttgaactcctgggctcaagtgatcctcctgcctcagcctcccaaagtgctgggattacaggtgtgctatcctattcttctaatgagacaaaaatcactccctaagcccctaccatgtatttggtcctatgttagctttgctggggaaacagcagtgaccaagacactcatggagctcccaggcccatgaaagagacagaccaatcagccgacagtcacagttcagagtggtcaggaggatgtgtgagcccagaaggaggtcactggccagacacagggtatcagagagggcttcctggaggaaggggcatataagctgagaccattgtgaaaaaaatccgagaaagcccagataaaccattggatctaactttttttttttttttggagggcgtgcagtgcggagtttcactctgttgcctaggctgaagtgcagtggcgagatctcagttcactgcaacctcagcctcccgggttcaagtgattctcctgcctcggcctcccaagtagctgggactacaagcgcacgccaccacgcccggctaatttttttttttagtagagagtgggtttcactatgttggccaggctggttctgagctcctgacctcaggtgatccacccacctcagcctcccaaagtgctgggattacaagcatgagccactgtgcccggcccggatctaacataaaacagagagagaagatattatgtttatgattaaggggccaggtgtggtggcttatgcctataatcccagcactttgggaggctgaggtgggaggattgcctgagcccagaaatttgagaccaccctgggcaacacagtgagacctcatctctactaaaaggaaaaaagaactagctagatgtggtggtatatgcctgttttccagctattcgggaggctaaagcaggaggattgcttgagcctgggaggcagaggttgcagtgagccaagatcacacctctgcactccagcctgggcaacagagtgagatcctgtctcaaaaaaaaaaaaaattactattaaaaaaatcccaactaacattcttcagtccaagcatcaaagaatgtttctggagcgtctgtcgtgtgccaggccatgtgctggggacataatcataaccatgacaaccccagtctctgccatcatgagcttgtagtccagcaagtgtgtaggggataagccccaaggcactgggatccaaccagagctagaaccccagcgctgtgtggggtgatgttaggtaagtggcttcacctctcagaccctctgtttcctcctttgtaacaccgagacgataatctccctggggttgtgtttttagaaattaagtaggttgtggcacactgagtctttgtcattgtgtctggaatgttccaggtacttagtaaacaggaacctttattaatcatctcttccccagggccggcagctggattggggagggactagcccttcccgaaccctgactccctcttaaccttcccactgtcaaagagatgtctgtgaggtagctgggctctgagggggcgggagagatgaacacgtccctgatcctggggtaggagagggatgagccatacagtttccttctctggaggtgacccactcttccagtacttgctaagggacttgacatgcttgtggggtgcagaatgtattcctgtgtgtgtatgtgttcatgaatcagacactaaccctgtctcaaaaagctcatagtttagtcggcatgatacaacgaaaaccctgttttctatttgcttctctggttttctttctttctttcttatttttttgagtcagggtctcactgggtcacccagtctggagtgcagtggcacaatcactgctcactgcagcctcaccctccagggctcaagtgatcctcccaccttagcctcctgagtagctgggactacaggtgcacaccaccacgcctagctgattcttaattttttatttatttatttatttattttttgagatggagtctcgctttctcgcccaggctggagtgcagtggcacaatctcggctcactgcaacctctgcctctcaggttcacaccattctcctgcctcagcctcccgagtagctgggactgcaggtgcccgccaccatgcccagctaattttttgtatttttagtagagacggggtttcactgtgttagccaggatggtctcaatctcctgacctcatgatccgcctgcctcagcctcccaaagtgctgggattacaggcatgagccactgcgcccggcctaatttttaaacattttgtagagatggggtcttgctatattgcccaggctggcctcaatctcctgggctcagtggtcctcccaccttggtttcccagtgttgagattacaggcgtaagccatcgtacccgctgcttttgtggtttcctttgttctctctctctttgtctacttctgttcatctttttcttttcatcattactttgtatctctctcttttagtcttcctatatttgttttgttttttttttgtttttgagacagtcttgctctgtcgcccaggctggagtgcagtggcgtgttcttggctcaccgcaacctctgcctctcgggttcaaacgactctcatgcctcagcctcctgagtagctgggactacaggtgtgtatcaccacgcccggctaatttttgtatttttagtagaggtggggtttcaccatgttggccaggctggtctcaaactcctgacctcaggtgatctgcccacctcaccctcccgaaatgctgggattacaggtgagagccaccacacccggcctatttctttatcttttagcaattctatacctgtctctgtattagtcagggtaggtcaggattttctgcagtaacaaagagcccccaaatcttagtgacttagaacaacaaaggattattttgctttatactacacattggtcacaggtcagtggtgggtcaagggctctgcttcatgctgtcttcactcagggtcccaggctgagggagcttccatttcttttcttactccctcccccactggggaacaaacgtggcgagtcataaactggctcttaaggctcctacccgaaagtgacacttctgctcccagttaattggccaaagcaaggccaggtgtggtggctcacacctataatcccagcactttggagaccaagatgggaggattgcatgaggccaggagttcaagaccagcctgggcaacatagcaagatgccataaagtagctgggcatggtggcacacgcctgtagtcctgactactcaggaggctgggatgggagcatcgcttgagtccaggagttggaggttgcagtgagctatgatggtgccattgtactgcagtctggctgacggagtgagacccggtctctaaaacaaaacaaaacaaacaaaaaacaacaatccccagttcaggagggcagggacatccctgaactaatagctggagctatgtggtgaacagctgtcatgactgccacggtctctgtcgctgtctctgtctctctgtcatcactatgtcatctgcctctctgtttctgtctctctctgtggtccatctccatccatcaactcctgcctctataattttccccaaaaggtctgacctggtttagggacagagatggggcttccaatatttgacactggtccctacataatggcttatgcctgaaaccccaacactttgggagactgaggcaggtggactgcttgaggtcaggagctcaagaccagcttgggcaacatggtgaaaccccatctctactaaaaatacaaaaattagccagacatggtggcatgcacctgtagtcccagctactcggagggtgaggcaggaggatcacttgaacctcggaggcagaggttgcagtgagccaagatcataccactgcactctggactaggtgacagagaccctgtctcaattaaaaaaaaaaaaaaaagaagatttggaactgtgtatgtgcagtggaagatgtaagggttgtttgttaaaccacaacaaaacctagcctgtccttactcataagatccttactcataagagaaggacagagagacatagatacaaagaaagtgatgacagaggggagaaatgggcaaagaatttcccctatcttgctgagggctttgggcgatcatgtgattgccgaactaagtggggctcactcaccccaacaagcctgggaacagtgatcccaggaagcccctggccctggaaagactgcaggtcccctttcgttccctctcatggcagcacctctagcccctgccttccctggccttggccctgaccccaccctgctctgctccctacagagcaaaccctggaagaagctgaagacagttctgaagtattcaccctttgtggtctccttccgaaaacactacccttgggtccagctttctggacatgctggtaagtggggtggtggtggacagagctgggcagagtctcctgggccagggaaagggatgttctctgtagtttagttcccccacctagtgatgggcttggtgacagtccccaccttatgggactgttatgggcagtgcttaggcctgggcctggcccttcgtatgtcagggcagagggctattccttgttattctggtggagagagggagcttcagacggacctgagctcaaaccctagttctgctctgtattcatgggtgaccttgggcaagttactttcctttactgggcctcagctgccccatctgttaatgtggagataaccttacctcccttgcaggattaaccgaagagttaaaatcaaaatgtatataaagattgaggccaggcacggtggcttacatctgtaatcctagcactttggcaggccaaaacaggaggatcgcttgagcccaggagtttaagaccaacctaggcaatatagtgagaccccgtttcaattaaaaaaaaaaaaagattggctgggcgcagtggctcatgcctgtaatcccaggcctttgggaggccgaggtgggtggatcccctgaggtcaggagtttaagaccagcctggccaatgtggtgaaatcccttctctactaaaaataaaaaaattagccaggcatggtggcgggtgcctgtaatcccagctactcaggaggctgaggcaggagaatcacttgaacccgggaggtgaaggttgcagtgagccaagatcgcagcattgcactgcagcctgagtgacaagagcgaaacttcgtctcaaaaaaaaaaaagactgaggcacaggactcttatgaatggaaatgatcactccttgccttctccgcgtgttcagagcatagcaggccttcagtaagtagcagctgtaacattttgcccccaggaccttgcaaatgcctgcagcacagagtagcacaatggtggcatatagtgctcttttgaaaggctaggccataaatatcttaggttttgtgggcctatggtctctgtcgcaactactcagctctgctgttacagcaggaaagctgccatagacactatgtaaacatatgagtgtgtctgtattccaataaaactttatttgcaaaaaccagcagcaggctggactagaaaagtgtgcccattggcaaatggcgacagtaagagaatttgtctgccttgtttgtctttagatctgacctggaaataaggcaagaccccctaaaactgtgtcaacacaagtttgccatctatatgtgttctggttactattgctgagtttattaaaaaaacaaaactcagcagagcacagcggctcatggctgtagttctagcactttgggaggctgaggtgggaggatcacttgagcccaggagtttgagaccagcctgggtgacatagtgagaccttgtctctacgaaaaataaagaaattaactgggcatggtggcatgcacctgtggtcccaggtacttgggagctgagggtgggaagatcacttgagtccaggaggtctgggatgcagtgagccttgatcgcaccacagtactctagcctagatgaccgagtgagaccctgtctcaaaaataaatacgccaggggcggtggctcacgcctgtaatcccagcactttgggaggccaaggcaggcggatcacgaggtcaggagatcgagaccatcctggctaacaaagtgaaaccccgtctctactaaaaatacaaaaaattagccgggcatggtggcgggcgcctgtaatcccagctactcgggaggctgaggcaggagaatggcgtgaacccgggaggcggaggttgcagtgagccgagatagcaccactgcactccagcctgggtgacagagcgagactctgtctcaaaaataaataaataaataaaataaaataaaataaatacaaaacaaaacccaaaaaccccaagacttagtgatggttaaaaaaaataacttagtagaataaaacaatcattttattgacctcagaagttttgggtcagcaattcagacaggatggcagggatggcttttcactgctccacaatatctgggaactcagctagggacacctggaggctacaagctgaaaacttttggaggttcattcacttgcatgcgtggtgattgatgctggctattggctggggtctcagatggggctgccacgtggctttgccatgtagctccttgagcttcctcacagtatggtggcctcagagtactcagatttctaacaagacagctcaggactaccttgaaggtaagtgtctctgccaacagaagtcatgcagtagcacttctgccataaaccgtcccatatttaatgggagagcaatctattttttatttattcatttaattttgagataggatctcagtgttgcccaggcgggagtgcagtggtgcagtcatagctcattgcagccttgaactcctggccttaaaggatcctcctgcctcaacctcccagagtgttgggattataggcatgagccactgcacccagcttgggagagcaattaagagtatactccttgatgggaaaattctataagagcaggatcaggaatgggtctgagacccactgtgatcaggagatactgttgtagccaactttggaaaatgtaatccaggctggacataatcacagcactttgggaggctgagatgggaggatcatttgaggccaggagttcgagaccagcctgggcatcatagcaacactaccccaacccgacattacacattttttttttttagattagctgggagtggtgggggtgcacacctgtagtcctagctactctggtggttgaggtgggaggatcacctgaatctaggagcttgaggctgcagtgagctatgattataccactcaatttcagcctgggtgacagagtgagatcctctcaaataaaaaaagaaaaagaaaatataatctgaaaatacagctggccactagaagaaattagaattattataatctatacactctgcgtggtccaggaaatgcttgatctataaattaacttaaataggccctggttgttagcaccttgggattccaggcagcagcaaaagcaaatccactctggagagtgacgctctggacttagatctcacagaattcccacagatgatcacatgtgtacaatcaaaaattacaaaacaaattaggatatcctgtgctgggaacaggacttggtttaagcaacagagaacagaaattcgccctttccttaccaacccctgggcaagacttttaagagttgcggcctgggcacagtggctcacgcttgtaatcccagcactttgggaggccaaggcgggtggatcatctgaggtcaggagttcaagaccagcctgaccaacaaggtgaaaccctgtctctactaaaaatacaaaaattagctgggcttggtggtgtgcacctgtaatcccagctacttgagaggctgaagcaggagaattgcttgaacccgggaggcggaggttgcagtgagccgagatcgcaccattgcactccagcctgggcaacagagtgggactccatctcaaaaaaataaaataaaatcttaaaatcattaaaaaaaaagttgcagggagagaaagcattgcaggagggtcgggcaagataatggtggccaggatctgatgcaaacaggcagctgcggagaggttctcttcctgatccagttcctgatcctctcatttattctaccacctttagggaacttccaggcaggagaggatggtcggattctgaaacgtttctgtcagtgtgagcagcgcagcctggagcagctgatgaaagacccgctgcgacctttcgtgcctgcctactatggcatggtgctgcaggatggccagaccttcaaccagatggaagacctcctggctgactttgagggcccctccattatggactgcaagatgggcagcaggtggggctggggcagccctggggcagggatggagggcagggggtgggcattattgaaaatattggcctggccaggcgcggtggctcacgcctgtaatcccagcactttgggaggccgaggctggtggatcacctgaggttgggagttccaaaccagcctgaccaacgtggtgaagccctgtctctactaaaaatacaaaaaattagccaggcgtggtggtgcatgcctgtaatcccagctactcaggaggctgaggcaggagaattgcctgaacctgggaggtggaggttgcggtgagctgagattgagccattgcactccagcctgggcaacaagagtggaaccctgtctcaaaaaaaagaaaagaaaagaaaagaaaatagcgccaagtccattttcaaagtggttgtaccagtgtaccttcccaccaccatgtatgagtgttacagtcgtcccagattctcaccggtgcttggtactgtctgttttattaacttaaaccattccgatgggtttggaataggatccctttttttcctctttgagacagagtcttactctatcgcccaggctggagtgcagtggcacgatctcggctcactgcaatctccacctcctgggtttaagtgattctcctgtgtaaaccaagtagctaggattacaagcgcccgccaccacacctggctaatttttgtattattagtagagatggggtttcaccatgttggccaggctggtctggaactcctgacctcagatgatccacccactacggcctcccagaatgctgggattataggcgtgagccaccacgcctagtctgcaagaagtgaactctaattgctttctccagctgggttcagtggctctcacctataatcccaacactctgggaggctgtatacacacacacacacagacacacacacacagacacacacatagtcttcaactctcccatttcattcttttagtagtcttttgataaacatatttttataaacaaaatagtatttgtattattactcttttttgagacagagtctcattctgttgccccgactgaagtgaaggagcatgattatagctcacagtagccttgaactcctgggctcaggcggtcctttcaccttagcctccagagtagctgggactataggtatgtcccaccaggcttggctatattttattttttatagagacatggtctccctgtactgcccaggctggtcttgaacccctgagctcaagtgatcctccttcttctgccccctgagtagctgggactgtaggtgcatactatcacacctagctaattttcaattttttgtagagacaggctatttaggaaaagctctgaatccatgcttttccgttctcacaccactgccacaacaatgagagcacagaagacttctgtgaccaaatgtttaggttttttaaccccacacaccaagcaacggacaccagctggatgtcctccaattcaagtctaaaaccatctacctggaaatagtgtcagatcccacaggttggggactcagtccccaagactgccccccagttacagacaccagtcataagttcaggccttcgaaacttctgactgattggctccaagttggagttcccatgtcctcctctttgggttcaaataatttgctggagtggctcaaataactcagggggatacttacttacctttactggtttaatataaagcaggggtccccaacccctgggccgcagaccagtaccggtccatggcctcttaggaacggggccccaccgtaggaggccagcgagcattaccgcttgaactccacctcctgtcagactagcgggcaggagattctctggagggcgaaccctattgtgaactgtgcctgcaagggatctagattgtatgctcctatgagaatctaattgatacttgatgacctgaggtagaagagtttcatccagaaaccatccccctcacagtctgtgggaaaaattatcttctacaaaaccagtccctggttgggtactgctacaaaggatactgcaaaagatgaagagaagtgtagggcaaggtatgggggaaggggtacggagcttccatgccctccctgggcgcaccacgctccaggaacctccacagggtcagctatctggaagctcctgagcccaatccttggtttttttttttttttttttttttttgagagggagtcttgctctgtgtcccaggctggaatgcagtggcctgatccgcccgccttggcctcccaaagtgctgggattagagatgtgagccaccatgcccagcctaatccttgggtttttatggaggctttaagacaccagcattccttcccccagagtatagggtgggatcctctctggggagggtcctaagacccacagtcaggaaggtggggaaagattagagtcctgccttggggcaggtgaaaggagggcaggaggaggtcagagattttggtttcttgagccagcttctgagatctaacacacctaaaattataacaaaagattgtggctgggcgcagtggctcatgcctgtaatcccagcactttgggaggccaaggcaggcagatcacttgaggccagttcaagacaagcctgggcaacatggtgaaactctgactctactaaaaaaatacaaaaatgtgccaggtgtggtggtatactcttgtaattccagctactcaggaggctgaggtgggaggatcacttgaacccgggaggtcctagaagttgcagtgagccaagatcacgccactgtactccagccttggtgacagagcaagactccatctcaaaaaaaaaaaaaaaaaaaggctgggcgtagtggctcacacttgtaaatgggaggcagaggcaggccgatcacgaggtcaggagttcgagaccagcctggccaacatcgtgaaaccccatctctactaaaaatacaaaaaattatccgggtgtggtggcgggcacctgtaatcccagctactcaggaggctgaggcaggagaatcgcttgaatccgcgaggcagaggttgcagtgacccgagatcaccaccattccattgcactctagctcgggcgggcgtcaaaaaaaaaaaaaaaaaaaaaaaaaagattgtaacaagggctatgagagttaccagccaggaaccatagagggaaaccaatatacattgtaactaacaccgggtctcgctatgttgccgaggctgatcttgactttctgggctcaagtgaacctcctgccttggcctcccaaagtgttggggttacagatgtgaacactgcacctggccctacctttaatttagtccagtttgtcagtttttttcattgtgtttaagaaatcttttcctactccaagatcatgcaaatattatgttttcttctacaagctttattgttttagctttcatatttagacctacattccagatagaattaatgtttctgtgtgtgggaggtagggatcaggttcatttttttccatatggattgttgacccagcactgtttattgaaaagacttccctttccccactgaattgcagtgcctagtcataactgcacaactctacgtgtgtgtctttgtggactctgttgtattctgtgcattgatttgcccattcttgtgccacactgtggctttatgtcttaatatcaggaagggtaagccctccagtttgttctacataatttcctttgtcacatcctctgtgtgctcaggacctatctggaagaggagctagtgaaggcacgggaacgtccccgtccccggaaggacatgtatgagaagatggtggctgtggaccctggggcccctacccctgaggagcatgcccagggtgcagtcaccaagccccgctacatgcagtggagggaaaccatgagctccacctctaccctgggcttccggatcgagggcatcaaggtgaggaccaggaaccgcctggcctgtcccgggaaggcctatagccagatcccaggcagggcttcttggggaaagccacgagagagtgcaggagacggcgtgggatgaaaggctggggctggggaagcccagcctctttcttacctccatacccatcagagcccaggttctgtttatccgtctgcctgagcatctcctgagtccatcttttcctcctctccttctccatggtcatgtcctagtccagccccatcttctcctgcctctgtctccctgggcatcctggccctggtctccctgcagcacaagagctggagggatccctttcccccagctatggagaaggtttctctttttctttcttgcattcctttttctttgtcaaattaaatataattgtatgaataggccaggcatggtggctcatgcctgtaatcccagcactttgggaggccaaggcaggaggattgcttgaggccaggagtagttcaggactaagctggccaacatagggagcttctgtttctagaagaaaaaaaaattgtttgaatagctagtcacacagttcaaaagtcaaaataatattataaaagggtaaatgtggagaaatttctctcccaactctgctgctgtccttcccattctgtccctctatccctctacctgctcatggggaaccactttgtcagtttcttgtatttcttcctgttagtgccagtaaatggagttgtagatccgaaatgttcctcagtacgcatactgattggtactttgctattttcacttaatagtaacaccctgcagagttttccacatcattccatagaaagcttcctctttctgtttttttttcccccacagctatgtaacactgtttttgtgactgtgcctggtcccctatagacagacacctgggttgtttccattttttgccattagcaggcctcaaagaatcactttgtatataagacattttgcaagtatgcagattgagctgtagatttccagaagcaggactcctgggtcaaagcttaaaggcatgggaaatttgcgagagatgaccaaacttccactctcggtgttatgccactgcacatcccaccagcaatgtatgagaatgcctgttgcagatccgaccatgccattctcctgttcgaaacccttctgtggctccctagtaccttgaagtgaagttccatagcctgtagggccctctaggatctagcctcttctctctcattcttctcttttcttttttttttgagaaagagtctcgctctgtcacccaggctagagtgccatggcacagtctcaactaattgcaacctccacctcttgggttcaagcgattctcccacctcagcttcctgacttgacgtgattactggcacgcactaccatgcctggctaattgttgtttttttttttttttttgagacagagtctcgctctgttgcccaggctagagtgcagtagtacagtcttagctcactgcaaacctctgcctcccgggttcaagcgattcttctgcctcagcctcccaagtagctgggattacaggtgtgcaccaccgctcctggctaatttttgtatttttagtagagacagggtttcaccatattgaccaggctggtcctgaactcctgaccttgtgatccacccgccttggcctcacaaagtgctgggatgattacaggcgtgagccactgtgcccggcctaatgtttgtatttttaagagaggcggggtttcactatgttgaccaggctgatcttgaactcctggcctcaagtgatctgcctgacttagcctcccaaagtgcagggattataggcgtgagccaccacgcccaacctctcattcctctcattctttctgtgtaccttcaggcacagtgaagcacttgcatttacttgaaataggcttgctttttcctgccacaaggcctctgcacccctctgccaggaatgctcttctattttttttttttttgagacagggtctcactctgtcatcccccaggctggagtacagtggcgcgatcacagctcactgcagcctcaatctcctaaactcaagtgatccccccacctcagtcttttgagtagctgggacacaggtgcgtgccaccacaccctggtctcttccgtctgtgccccctggtctggttgattctcagtcatttttctgtctcctttcaaattttgcttcctcagggaagccctccctgatttctgttctactgatcagggtcccctcttcacctcctcatagctccttatactctttcattattcttatcttcctttctgatcatcttaatcagtgtctgccccctcatctgactgtgtctgtcgtgttactccctattgccaagtgcccacatagcacctggcacagtgtggcagatgacttaggtgggttctctgagccctactgaaacataacagataacattagtctcattagtctcaaataactatatgccaggcactgtgctgtgcatcctacacacctggtttcctctaatccttacaccagccttagcaagtagacaccaacacaattcccgttttccagatgaggaaactgaggctgaggcagctgaaatgacttaagactgcccagctagaaaagagcagagatggccaggtgcagtggctcacgccagtaatcctagcactttgggaggccaaggcgggcggagcatgaggtcaggagatcgagaccatcctggctaacatggtgaaaccccgttgctactaaaaatacaaaaaattagccaggcgtggtggcgggagcctgtagtcccagctatcaggaggctgaggcaggagaatggcatgaacccagggggcggagcttgcagtgagcccaggttgcaccactgcactccagcctgggtgacagagtgagactctgtcaaaaaaaaaaagaaaagagcagagtcacgattcacagccagctccaccctgctccaaagcccactttcctagatgggttcaaccaggaggttcaaggttggaagggtgtggaaggactggggctcaggcatgtgacctggggctgggttgagctgggctgggcaggtaagctggcttcctcctctggcagcaagtgtgcaggcaggtgggtggccctgggaagttgttttttttgagacagagtcttgttctgtcacccaggctcgaatgtagtggtgcaatcaatgctcactgcaacctctgcctcccgggtttaagcgattttcctgcctcagcctcccgagtagctgggattacaggcgcccgccaccacacttggctaattttttgtatttttagtagaaacggggtttcaccgtgttggccaggctggttgtgaactcctgacctcaagtgatcctcccgcctcggcctcccaaagcactgggattataggcatgatcccacacctgggaccacaggtgcatactaccacaccagaattttttttttttttaaatagagatggggtcttgctgtgttgcccaggctggtcttggccaccgcgcccggcctcctgggaggtatttgaggttgctgggtattgggtgcgggaaggaaaagcccatgaccctgcccctccacaccctgccctacagaaggcagatgggacctgtaacaccaacttcaagaagacgcaggcactggagcaggtgacaaaagtgctggaggacttcgtggatggagaccacgtcatcctggtgagtgggacacccatgtcccagaatgtagcagcttaagacagccaccatttattcttgctccagagtcagtggtcttctgctttgggtggggctggactgatactggctggctttgctcagtctgaggtcagctggtggcttggcaaggctggctggtccagggggccctgctcccagctctgccggttggctcatgacttggccgcacgtctctcgatagcaggatggcctgggcttgctctcacagtggaggcagggggccaagagaacaagtaaaaatgcaaggcctcttgatgcctgggctcagaatggccaccatcatttctgccgttcggcaagtcatgtgacccagcctggatcgaggggtctggagacagactccgcctccggatgggagtggaaattcatggaatccaccactcttctccatgccaccttgatgaatccaagccctcactcctctgccctgtcttccccatggctcccctattccatcctggctagagcctgcctgctcctttgggggaatggggtgaggtcagagctcaaggtgggcaaggccccacaaagtccccatgctaaccaaagaacgctccctgtcacacagcaaaagtacgtggcatgcctagaagaacttcgtgaagctctggagatctcccccttcttcaagacccacgaggtgcgagccctggcttccatgggtggatgtatgggtgtcggggtccaggtgcatggaggggaaaccattgatgagttacaggtcaaagatataaaaaggggctgggcgttgtggcccgcacctgtaataccagcactttgggaggctgaggtgggaggattgctggagcccaggagtgccaagaccagcctgggaagcacagcaagaccccgtctctatttggaaaaaaaaaaaaaaaaaaaggccgggtgcagtggctcatgcctgtaatcccagcactttgggaggctgaggcgggcggatcacttgaggtcgggagtttgaggccagcctggccaacatggcgaaaccccgtctctattaaaaatacaaaaattggctgggtgcggtggctcatgcctgtaatcccagcactttgggaggccgaggtgagcagatcacgaggtcaggagatcgagaccatcctggctaacacagtgaaaccccgtctctactaaaaaatacaaaaaattagccgggcgtggtggcgggcgcctgtagtcccagctacttgggaggctgaggcaggagaatggcatgaacccgggaggtggagcttgcagtgagccgagattgtgccgctgcactccagcctgggcaacagagtgagactctgtctcaacaacaacaacaacaacaacaaaattagccagaaattgcttgaacccagtaggcagaggttgcagtgagctgagattgtgtcactgcactccagcctgggcaacagagtgagactctgtctcaaaaaaaaagcaaagctaggcatggtggtgcacacctgtagtctcagctactcaggaggctgaggcaggaagagggcttgagtccaggaggtcaaggctgcagtgcattttgattatgcctcacactgaacatttgctgtgtatttgctatgtaccaagcactgtcttaagcacttaatgtagattaattcctacatataatatgcccagcagcctctgaggtaaatgatcctacagtcgaccccttatcctcaggtgatctcctccaaacccccagtggatgccggaaactgtggatagtactgaactatagactgtgttttctcgatctgataaccaagatggctcctaggtgactagtgggtgggttgcggatacagcatagacttgctgaacaaagggatgattcgcatcccaggtgggacgaagcgggatggcacgagatttcatcacagtagttaaaccaatgtgcaacttaaaacttacacattgtttgtttctggaattttccacttaatatttttggatcgcacttgactgagagtaactaaaaccaaagaaaatgaaaccacggactggggagactaactgtattactctcactttgtatatgaggacgcagaaccacagagaggttaagacacctgcctaaggctgcacagacaggaggtggcacagccaggatatgaatcaggcagccaggctccagggttcatgctgtcaatcaccctgctctgctgcctgtcaggaagggaccttggccagtgcctgctcctcccttaacctcccgtctctaccccggcaggtggtaggcagctccctcctcttcgtgcacgaccacaccggcctggccaaggtctggatgatagacttcggcaagacggtggccttgcccgaccaccagacgctcagccacaggctgccctgggctgagggcaaccgtgaggacggctacctctggggcctggacaacatgatctgcctcctgcaggggctggcacagagctgagctgctcagccaccatcaggttaattggatggcgccagtctggctggaggagccctgagatgccatgggaggcctgaggttggccacgggggagctggcctccagggacgggagagattgtgtcatgtgccacacgagaccaacgtggaaaagtctgaagggccttgggagaccaggtagcacctggccccatcatgatgcaggggttttggggacctggaaggaaggtgatgaggcagtgagtcagaaaaaccagaacggggtccccggatctgccgggaaggcttctgaggggctgccctgagagcattcagttcacatgtcacagggtatggtgtgacagggtgcctgtggacacatgaatcacttctaacctgcctccctgtcagcctccaggctgccagctggctgaggccagggactgggtcaggctcatctgtggcgcctcagagggtcagcatcattggtgaacagatgcaggcgctgctggaccatctggggagagtgacagtccatgtcttcaccagggagccatttgagtgctgagcgacaagaggctcagagggcatgaccccatgggactggatgcggcctgagggctgataccgctgggcggtatcctgccctgctgtggccctgtgggatcctccgtgttcctcggcggactctgctgacctcctgcagacccaaaccacagccacatcccagcttctgtgccagcactgtgacagtacctcgctcctctgtgcaccagatccggcctcaggacttacacctcctgcctgacccccaggcttctctctcctttctcccagcaaactgcagtggcagaaaggaggttcagaggctgggaaagtgggcctccccttgcaactcagagctgctgcactcaggagggccccatccaatcccgggcccctgcagggaaaagcgctgggtgtgtgtcagaggcgcagggtgggtggggctgccagccaggaccctggcctgcagcctgatccaaaccaaagactgtagaaccctggggtgtggctaacggcccctccagcacccatagccaggtcttcctggcccttgaggctgggctggcggacaggcacctacctcttccttaagctgaagctcccacactgtcttccagggctgaggagatgctctccttttctactgaccatcttgatacttatttatacgagaggcagttgctggacggggtagtactgggaagcaggaggcagaatggctctgctgagcctcctacccatgacaacaccccaataaacagaacattcagagccaatgtcgtagagctttttattttgcatctggagtgtatttggacacgtgggctgggtggggtaacaggataatgagcagtttgggaaagaggcaggctccaagcaggctggttcactcacttggcagtcactgggcggctattcttgtgcctggatgtgttacaatgcaggggacacagtggtgagcaaggctgctccaagccctggctgggatgggggatgcacagacaggctgatcagggctgggatggtggacacgcatcctctttaccctgatcactggttagaaatactgcactgtggccgggctcagtggctcacacctgtaatcccagcactttgggaggccgaggcgggtggattactcaaggtcaggagttcgagaccagcctggccaacatggcaaagccccgtctctactaaaaatacaaaaaattagccaggcatggtggtgcatgcctgtaatcccagttacttggggggctgaggcaggagaatcacttgaacctgggaagtggaggctggagtgagctgagatcacgccaccgcactccagcctggacgacagaacgagactccatctaaaaaaaaaaaaagcaacagtgctctgtagtttccctaaatgagatgggctcagttagggacagagaagtgatccagacaggcctgttcctccttcagagtggaggggtcaggtattcatgaagctagtaatcacacacactcactagaagtttgtataagtggacaggaaagtttgtggtcagcaccataatgttcagggagccaggagacagcctggctgagatactgactacctagcttgaatcctgaccttgccatgtgctagtcatgtgacctcaggccagtgattccacttctccaggcctcagtcttgccatctgtcaaatcgggtccatctagcaccccccttacagggttgccagatctgctaacacaggtagaggggctggcacaggtaactgctcccagatgggctttaaaactgtgaagacatgaggtgggggaggggtgtcttgactggggctgcaggactcttccctgaggtagtgatacctgagccccaatggaaaagttaaggagtgatccgcagcagagggctgggggtgggactcaatgatccggggatttgaacaacacttcagggatctaaaaggccagtatgactagtaggtggcaagcatgaggaagaccttgggctaaggaggggtgagctgaggctgacgcagttcagtgtccctgtcctgtgagaagcagagggcccaggcaggaggttcctcaaatgtctagtgagatgacagaggcggcccctagtgagaaacagacgatgcgacattcagatggaataggcaggccgcagggtccgggctgttgtcaatctctccctagagggaccagctggtgctcaatactgcagggggtggccctgatgaaggaggactggagacccctgagacctagcttcaatcttgtcgccatcacacagtgggagaagtgtaggcacacttcaaatggttaccgagctaggctgcagcctgagaccgcagccgcagctaatggctgcagtcctgtggtgtgaggagcagggcctggccacagaggccagcccgtaccccacccacgggcaccacgtacacccggccgtcagtggcccgtgagggcgagaagtccgtcagctgcaggttgctctcccggacctggtcgtagtcccacagctgatagtgccaactcttgccctgcttggacagcaggtagacagctcccggggagccctcctctggcagggatggtggttggcagggcgtgcccagcactgggtggaacaggcccggcagctcagggtcctcagtgtagccgagactgggcacagcccgaacacccagcaggacccctgggggagaggagaaggtggtgagtggcagtgactgagccaggaccaggtgctggggctcactaagttccgccctctcccggccctccagggtgggtgcagctgccattcctaggttacggtgacgttagtggtggccagtgggttgggatttggacccaccgtggcacccggctccaaagctgtaggtgttttaagtcttgcctcatctggcctgagcacaggggaggtggggaggcagcatgagatgaagcaaatgccgtcacccggtcatcctcagctctttagggaagaggctccaagaggagctgtcaagaccacaaagccatgaagaagctgagcggagcctcccccggacctcctgacgcggaccaacctggccttctttctttcaggcagggggaatgatgaaaacggtgctggtaatacttacagagacatgtcacacgccaagccctgttctattttttttttttttttgagatggagtcttgctctgtcacccaggttggagtgcagtggcacgatctcagctcactgcaacctccgcctcccaggtccaagcaattttcctgcttcagcctcccaagtagctaggatttcaggcatacaccaccacgcctggctaatttttgtatttttagtagagacagggtatcaccatgttggccaggctggtctcaaactcctgacctcaagcgatccacccaccttggcctcccgaagtgctgggattacaggcgtgagccaccgcgcctggccaagccttgttctaagagtgctgagtgctctgcctacaaggcagccttatgaggtgggtactgttacccccaatttccagatggggaaaggagctgtccagagaggtgatgatacctgcccagagtcacagagcctagaagaggctgtgccaggcctggagcccagacggtctgatcctgaaatctgtgctctgagcttctgtttgtagaagctccaactggcagacacctggggcccagcctgcccggtgctaatgctaagtgcccagcctggctggggaggcaccagcacaaggggtgagaatgtcaggaggattaatggaggccggggagacccaggttgaggggtgcagacaaaggagggggaacccacctgcactcaccgcccagtgtgccttgtggcccttcctctgacacggctcatggttgaagtcctcgtcgtagctggtgctggcattaaggtaaaaacgatggtgtggccctgggacccaccctttgccacccctgccctcctctctcccaggccctgggatacgggatgagcaggggatgtccagtgaccaggtgctgcaggacgaggtctctgttgggaccgcccaggccaccagagagcagcttggcctggcagcccagcacctcctgggccagcctgcccatatcggccactgcagggtgagagcacacagagggggcttgctgcatgtgcccagcaccgtgctgagggctcacagtgggcgatgcttccaaccctcaccatgaccttccaccccttggtacaaatgcagaaaatgaggcacaaagagcgtgagtggcttgtccatggccccagcgaagaggtggcagagctgggtttgcaacctaggcagccagctcaagtccatcttgtaacctctctgctctactgggcagtgggaagggcccaaagaatggaatgagacaccctgacacacggctgccagcatcccacccagcctctctggtcccagcctcatgaagagatgatggagcatgcagtcacccagctcacctgagaacatctctccctgggccgtgtagcctctttccgtggccacccgtatgagtctctccagggggacgccactggggggcgacaggagagtacctgccatccacaaggccaccagcccgcatctggggacagagaggcccagcctgtcaatcctatgtcacagcccccttacctggaagctggagttggggaacaggtttgctgccctggaggagtccccctcccctctcccaggccagcgagggagacctgactccccttcaggggagagcccagggctggagggctgggggtggaaggcgggggagaggtcacctgagcttcctgggaggaggaaccaaggtggagttagagagatggaccaggctcattcgttcattcctcgcatgtcccaactatgtttactatgcaggcactcagaagcctgagtggaaagttccccctttccttccctcctcctcccagcagggacaatccactcctcttctccagatcagtccttaagaagcccagcaagggcagagtaaaggcagcagatgggctggggttcccgcatcagggcacatactgagggccttcttggatgagggacggcaggtctgcacagaagaggatccaccgcaggtcacctcggaacctgaagcagagccgtgctcagtcaccagggagccagctctgaagcaccccctaccctgaggtctggctgggagtggtcgtatccagggatgatgaagggaatatgggcctggctgtcctaaggctgaaggcggctcctggttcagtcactgacttcccctccccaagcttcagtttcctcatctggtttgtgggaatggtccttctgcctgcctgctccctgctcgctctctcagttattgaagggtgaggagcaaagggtggcactttgcaaccaggtttatctgaggaaatttctcaaagtggtatctctatctccaactctttttcttgctctgttgcccaggatggaatgcaatgatgcaatcaaagctcactgcagcctcgacctcccagggtcaagttattcctcctgcctcggcttcctgagtagctgggagtataggcatgcaccaccatgtccagctagttctttttattttattttattttgagacagagttttgctcgttttgcccatactggagtgcaacagcgcgatctcagctcactgcaacccctacctcccgggttcaagtgggtctcctgcctcagcctcccgagtagctgggattacaggcatgcgccaccacgcccagctaattttgtatttttagtagaaacggggtttcaccatgttggccaggctggtctcgaattcctgacctcaggttatccacccaccttggcctcccaaagtgctggggattataggcgtgagccaccgtgcccgactctttttatttttagtagagatgagatcatgctatatgttgcccaggctccaaactctgtgatttgtttttcgcttcaagtctgtttcctgggctgttcaacaatgaaaatcccttaactgaactttgaataaaaccaggtaacaacatgcttaaggcctaaaacatcaccttgatagtgaatctttgtaccctgggggaggccactcagatagtctggccctgagggattcattcctttttgtttgtttgtttgtttgttttttgggacagagtttccctcttgttgctccggctggagtgcaatggtgcgatcttggctcaccacaacctccgcctcctgggttcaagcgattctcctgcctcagcctcctgagtagctgggattataggcatgcgccaccatgcctggctaagtttttgtttttgtttttgtttttttttgagacagctggagtgcagtggcccgatcttggctcactgcaagctctgcctcccgggttcacgccattctcctgcctcagcctcccgaatagctgggactgcaggctcccgccaccacacctggctaattttttgtatttttagtagcaacagggtttcaccctgttagccaggatggtctcgatctcctgacttcgtgatttgcccgcctcagcctaccaaagtgctgggatcacaggcgtgagccactgcacccggcccttttttgtatttttagtagatacggggtttctccatgttggtcaggctggtctcgaactgctgacctcaggtgatccacccgcctcagcctctgaaaagtgctaggattacaggcgtgagccaccatgcccggcctccttttttttgttgagatgcagtcttgctctgtcgcccgggctggagtacagtggtgcgatcttggctcactgccacctccacctcctgggttcaagcaattctcctgcttcagcctcccgagtagctagaattacaggtgtgtgccaccatttccggctaatttttatatttttggtagagacagggttttgccatgttggccaggctagtctcaaactcctggcctcaggtgatctgcctgccttggcctcccaaagtgctgggattataggcatgagccaccgtgcccggcccatgcttattattcctattccaaggctggtaagaaggcaaggttcggtttgggtgttgggggggtgcggactcagagctcctggttcctagtttagggtaccctcctgatgaaagatgataccacataagtatgattaaaagcatggaggccgggtgcagcagctcacgcctgtaatcccagcactttgggaggctgaagcaggtggatcacctgaggtcaggagttcgagaccagcctggccaacaagacgacagcccgtctctactaaaaatacaaaaaattagccaggcgtggtggtgggcacctgtaatcccagctactcaggaggccgaggcagaagaatcgcttgaacccgggaggcagaggttgcagtgagctgagatcatgccactgcactccagtctgggcaataagagcgaaactccatctctaaataaataaataaataaataagcatggagccaggctgggtgcggtggctaacgcctgtaattccagcactttgggtggtcgagacaagaagatcgcttgggcccaagaattcaagacccagcctgggcaacacagcaagactctatatctacaaaaaaatatatatgtacaaaaaactagccgggcatggtggcgcacatctgtggtcccagctattttggaggctgagatgggaggatcacttgagcctgggaggttggggctgcagtgagctgtgatccagctactgcattccatcctgggcaacagagcaagaccctgtcccaaaaacaaacaaacaaacaaacagcttggagccctgccgccagagttcaaattggactcttcctctttctgcactatagctaaggggcattatagctaaggggcttcacttctatgagcctcagttttctcaccaggaaaatgagacaataaaagtttctacctcatggggttgttgagaggattcagtaaattaatatttaaacacaacagcgcctgacatagggtaaggcattcagtaaaaggtggctgtaatttgcattaaatttgcctcatctcagtgggggcatttagggaaggttataaatgtgtccggaggccaggcccagtggctcacgcctgtaatcccaccactttgggaggctgaggcaggtggatcacctgaggttgggagttcgagaccagcctggccaacatgacaaaccctgtctctactaaaattacaaaaattagctgggcgtggtggtgggcgccagttcactccagcctggatgaaagagggaaactccattaaaaaaaaaaagtgtctggaaagcttggagtttcaatgtgagtcctggcaagtcgcttctccctcttttcttcagccaggcaatcactaaacctcagcctcagggccccagcctaggtctggcactctcctttcccctcccacctgggtccctggatgtcccagtttcctcaaggctcctaagtaccacttccacaggcagcctccttttctgcacagagcctctccagggctcccccgtgccctcaggaaagtctcagtccctttgcacgacccgctctgtcctgcgtgggctggctctgccgctttcacagccccatgtttgccacttcccccggcaagttaaggacatatttgcagttccttgaatagaacatgtcctcatttcactccaggcccctgcgcaagctgtatactctcatcacacagcatttgcacgacttgctcaacagcactcagggttccccttctccaagaagctccccctgactccccagcctgggtcagacacccctctgggctttgtcatgacagccctgaccactctgggttgtcactgtctggaaaggtggagggatctgtctctctcactagactgggcatttgctcttttttttttttttttttttttttgagacagagtcttgctctgtcttccaggctggagtgcagtggcgcaattttggctcactgcaacctctgcctccagggttcaagcgattctcccgcctcagcctcccgagtagctgggactacagttgcatgccaccacacctggctaatttttgtatttttaatagagatgcggtttcaccatattggtcaggcaggtctccaactcctgacctcaggtgatccacccgcctcggcctcccaaagtgctgggattacatgcatgagccaaagcacccggactggactgggcacttgtgaggacagctttcttcattgctggaggcacaccaccatggaagagatctaggtgggggacctaagtagtcagcctgtttgatcttgaggacacgggaaccccccccccaccccaagagatctgtgaagtgtctagggcagagcctgggtggtgggtggggcatggagaccctaccggtccttgtgtagtttcagaagcctcttcacatcttctctgcccttggggaccgggccggccttatcaaaggcctccttcaggagctggctcttctccaggccgaagacatgacggggagcaggccctgtggcagcgggtggaggaggcagtgggagcggtgggggaacaggggtctgctgactccagggaggggatggtaaagctgaaaagtccaggggacttgggggtagaggaggagatggaatgctgctggcttggggtacaggggtttttggaggagaaattggtggttttaggggaggagagcatggagaagtcattttggggtctacaggaggtgttgagaggttcagaaagcggggagggaaggatcctccaacggagaacggtctcagggatggagattttaaaggtttaagagctgagttccagaatctggggactgagcagtgggtgtgaaaggaccagggctaatatttgaaaccacgggagcaggaattgcgaggctgactcaagtcataaggcacctgacggttaacagggtggggtccttaaatccggaaccggatctgtggtaccggttgggttacctcgggagtcttaggtggagagttagtaggagttaactcattctttggggctggatgtggaaactcatgagtgagtttgggatatgaaggctcagatctagagtgaggtgccttaaggatgcgacttagggacccagggctaaagattcggagaacttaggttcagtaccccctcacatcccaggcccgagttcggaacctttgagctgacctttgagtcagaggtcaagaggtcaaaaaggacacctggcagggaaaatggcctagttgtggagaaggtcctggaaccagagcaacaaaaaacgtctgtgggttggagaagactcagagatcagaggccggtgggcgccgcgataaccactggaaaaaggaaaggagtcaggaagtaaagtgcacctcccactcccggaaaatggcggcccccgcacactgcctttcccatatcacgtggtattacacgcaacagttcccgcccattttgcgatcacgtgacagaaaacgcagctctggcgggggtaagaggcgggactccaaaaaggattgcctccggaagacaccgcagcgcgagacgcgtacagactcgtgaccttcactgattggtccgtagacccgggcgccacggaaggaggtgggctttcagggagtggggcggggtttttctacctaggcgggaacccaaatatcgttttgattggcaacagctgagcccagaaacgagacttgctctgattggtcaagctactgcgtttccgcgcggcgattggctggcagaaaggcagaggcggggccaggagagaaagctttgtggtttggtctcagggaagtagcaggcgccggttgagagaactacggccctgtcggaaggtaacctccggtgcaaacgaccatcggcggcaggcgagcggtacgcttggcgtccgggccttcctgggcccgtctgaggaaacttgctgctcgaggccaggctgcctaggacctgtcccttttttctatactggctcccacatccgggttttttctccgggacggcccttcggatgcttgggccaatgggaatcgccatttagggtgctccgcccaccgggtcgcgtagagcatcctggaagtcgtagtaaatctctcgagagttctctccgcacgcgggctggagaagcgggtcctacgcacgctttgttgtcgcgctttgcctccgtccttgcccctactcccgccttacctgacttccttttcggaggaagatccttgagcagccgacgttgggacaaaggatttggagaaacccagggctaaagtcacgtttttcctcctttaagacttacctcaacacttcactccatggcagttcccgagacccgccctaaccacactatttatatcaacaacctcaatgagaagatcaagaaggatggtgagttctcgggatagtccggagtccagactgtcccgcacgggctggcccctcttccgtcccctgcacccgcctctctttctaagtgtttgtccagccaaacttcgagttaactccttggcctttacacaaactacttcctgtcttcaacactccattagttcatcttacactctgccctttaacgtggtcactgctgctcatcttacaaggtttgaggtcacaggacccttcctccaggaagccttgccttgtcccttcacgtggctgccgctgacttgccgtacgctgagaccatctcccatcaagccctgattcctctgagctgtcgtggggctctctctcctcccagtggcctttgaactccgtgagggcaaggactggggctttcttggtcaccggctttttcagtgatcagcccacaatgaacatgtaccataatggtggctaacgctctgtatcatgggctggtctgtgtgctttcatataaatcttgataacatttaattctcacaacaatcttgtaggaagaaggctattgttattcccattcgtcaactaagaaactggggccgggcgcggtggctcacccctgtaatcaatcccagcactttgggaggccgaggcgggcggatcacctgaggtcgggagttcgagaccagcctgaccgacatggagaaaccctttctctactgaaaatacaaaattagccgggcatggtggcgcatgcctataatcccagctactcgggaggctgaggcaggagaattgcttgaacccaggagacggaggttgcagtgagccgagattgcgccattgaactacagcctgggcaacaagagcgaaactccgtctcaaaaaaaaaagaaagaaaagaaaaagaaactgagacaggggtgatgtgacttgcccagggtcacatagcaagtaaagtggttgaggccacccgtatagaattctgcttaggaacccaatttttggccgggcgtggtggttcaggcctgtaagcccaacactttgggaggctgaggcaggaggatcactgaaacacaggagttcaagatcagcctaggcgacaaagccagaccttttctctacaaaaaaaaaaaaaaaaaaaaaaaaggctgggcgtgggtggggtgcgtctgtggtcccagctacttgggaggctgaagtgggaggatcgcttgagctagagaggttgaggctgcagtgagctatgattgcaccactgcactgctgcctgggctgagcaagaacctatctgaaaaaaggaaaaaaaaaaagaactcaattattgaaatcggaaagactctctcacattctcaagtaaattatcacctttattgaacctcattttccagatctaaaaactgagcaaaatcataataccttttttgcatggatgttgggggagattaaattagctaaaccttgcagtatttcttttttatggtaactggcagctagtaaagggctggataaatgttagctcttatcacttcaagaaaattatcgggagaaccgaaggagcttgttgggattcagtttgaggttaccagtgaagttgctgttgaagaaagcaaaaccagcagccgggcactggctcacgcctgtaatctcagcactttgggaggctgaggtgggcagatcatttgaggtcaggagttcaagaccagtctggccaagatggtgaaaccccgtctctactgaaaatacaaaaatcagctggatgtggcggtgcgcacctacagtcccagctactcgggaggctgagcaggagaatcacttgaaccctgggaagcagaggtcgcagtgagctgagaccgcaccactgtactccagcctgggtgatagagactgtctcaaaaaaaaaaaatcaggagtgtaaattttgcatatgttttttttttttttttttttttttttttttgaggcagagtttcactctgtcacccaggctggagtgcagtggcacgatcttggctcactacaacctctgcctcccaggttcaagcgattctcctgcctcagcctcccgagtagctggaattacaggcacccgccaccacgcctggctaatttttatatttttagtagagacggggtttcaccatgttggccaggcttttctcgaactcctgaccttaggtgatccgcccacctcggcctcccaaagtgctgggattacaggtgtgagccaccacacccggcctgcatatgtttttagagtgtggtgcccaaccattatcgggcagtgctggggacacattggtgacatagaaccctggttttttgtttttaaatcttattttatttatttatttatttttgagacggagtcttcctctgtcgcccaggctggagtgcagtggcaccatctctgctcactgcaagctctgccttgcctcctgggttcacgccattctcctgcctcagcctcccgagtagctgggactacaggcgcccaccagcacacccggctaattttttgtatatttagtagagaaggggtttaaccatgttagccaggatggtgttgatttcctgacctcgtgatctgcccaccttggcctccaaaagtgctgggattacaggcgtcagccccagcgcccggcgttttttttttttttttgagatgagacggagtgtcgctctgttgcccaggctggaatgcagtggtgcgatctcagctcactgcaacctccgcctcccgaattcaagtgattctctgcctcagcctcctgagtagctgggattccaagcacctgctaccacgcttggctaatttttgtatttttagtagagacggggtttcaccatcttggctatgctggtctcgaactcctgaactgtgatccacccgcctcggcctcccaaagtgctgggattacaggtgtgaaccaccgcacccggccagaaccctggttctttaggacagtgacagcccagagtagtcagggccatcaggcaggaagcttaggcagagtgttgagggctgggattgggaacttagaaagacagagagatccattcagcttccaggaaaaggagacattttggagagcctgccaggtacagtaagcagtatttatgttacactgagggagaagagcattcttaacttggtccagcttgttcagatgtttagggtcaaaagagcctggcgtattctgagtattacaagtagttttgaggcttgtaaatcatggggaaacttccagtgagctgtgcactggtggctcatggctgtgaggtgttggactttgccctgagggtgttggggagccagactgcttccctgtcctggctgcctccctggtggaatatcctcccagctgtggagggtaaatgcgaatgggcgaggggaggctggagagtagagagaggcccagagtcccgtggaatgagtgaagtctgagcaagattcatggggatggagtacggagaggaaaaccagaaatgtcaccaccaggagaatttttgactaattgcttaaaaacaaccttgactgctgtccctgcccccacccagcctacacattttcttgcttctttcctagcctggtatctattttacaagtggcttctgcttcagcttagcttttttttttgagatggagtttcgatttgtcacccaggctggagtgcagtggcgcaatctctgctcactgtaacttttgcctctctggttcaagctattctcatgcctcagcctccccagtagctgggattacaagcgccctccaccacgcctagctaattttttttcttttcttttttttttttttttttttttttggcatttttagtcaagacggggtttcaccgtcttggccaggctggtcttgaactcctgacctcacgtgatctgcctcagcctcccaaagtgctggaattataggcatgagccaccatgcctggccagtttttatgaaggttggagtccagtggtgaggtcatggctcactgcaacctctgcctcccaggctagagtgatcctcccacttcagcctcccaagtagctatgaccacaaggcatgcaccactatgcctggctaatttttgtatcttttgtagagacagggtttcaccctattgcccagactggtcttgaactcttgagtgcaaaggatctgcccacctcggcctcccagagtgctgggattacaggtgtgagccaccatgcttggccatctcagccatcttctttgcataagacattggtgccctttgcagacctgggtggtgagagggagtccatccttgttgagcttgaatctcacttgctgtcaagtgatgccctttgctggtgagatgtggtggtaccgggttcagatggaatacgtggactgggctctgccatacgcttccttatgccctccagattgatgccctgggccagtgaggaatcctctgagaacctgtttccagtaaaattgggacagtcatagttgccacctaatgggtttgttgtgaggaagtgaagttacctccataaagcatttgatgggggtgcgatgactcatgcctgtaatcccagcactttggggaagccaaggcaggaggatcactggagcccaggagttcaagaccaacctggccaacataggagactgtgtctacaaaaaataaaaaattagccgtgcgtcgtgctgcgtgcctatggtcccagctccttgggaggctgtggtgggaagattgcttgagcctgggaggtcaggcctgtagtaagctaccatcatgccactgaactccaccctgagcagtagaaggagattctgtctttaaaaaaaaaaaaaggcacttgatggtatctagtcaaatgtttgcagccaggtgtggtggcacactcctgtaatcccagcactttcggaggccaaggtgggctaattgctgaagctcaggagttcaagaccagcctgggcaacatagcaagaccctgtctctgcacaaaatccagaaattagctgggcatggtggcatacacctgtggtcccagctactccataggctgaagtgggaggaccgcttgagtccgggaggttgaggctacggtgagccatgatcatgccactgcactccagcctgggtgacaaagtgagaccttgtcaccaaaaaaaaaaaaaaaaaattgtggtggagtctgtgctaggcttggcatactgcagtaaacaaatgggacaggcttatagctcctcaggcaagatagacaagttaacgtaccatgacaggaggtgggaaatagtcatgaaagaaaaggaagtagagtaagaatgacatgggaagaaatttagacgtcgtggtcagaggtggcaacatttcctctgagactgggtgactagaaggaggccaccatgtaaacctcaggggagggatgttccaggtaaagagagcagccagttcaaaggccctggggcaaaattggtgtgtcagacctgggggccagtgtggttgggaactcaggagggcggtggaatgtgggcagggatgaggtgggggaaatctgccagggccacgtcatgcaggcccatgtcagggtgctggtggcagtgaaaagaatcactcatttatcgagtgtttactacgtgccggatgctgtcctgagcactttgcatgtatgtgcacatgttcattatatagcagctctctgtaagcacatcttacagaagagtagaagagtgtacttggccacttgagtggttcctggctgcttctgtgattgttaggtcttgagagattatggacccgaggcattctgggtaccccatcaattggctgatggtcttctatttgggctgcgcttcttctaaaaaggggagctcaaaggtctttttttcccccactgcagagctaaaaaagtccctgtacgccatcttctcccagtttggccagatcctggatatcctggtatcacggagcctgaagatgaggggccaggcctttgtcatcttcaaggaggtcagcagcgccaccaacgccctgcgctccatgcagggtttccctttctatgacaaacctatggtgagcattgcgggtacggaggctgtgtgggtgtgtaaaatgttataggagactgggcgggcctggattagaggaggggatattacggttcatttgccaaggtgaggctggaccaggctcccactgcaccttgcctcatttaaaaatcttttctttggccgagggcggtggctcacgtctgtaatcctggcactttgggaggccgaggcaggtggattacctgagctcaggagtttgcagccagcctgggcaacaccgtgaaaccctgtctctactaaaatacaaaaattagctcggtgtggcagcatgcacctgtagtcccagctactcctgtggctgaggaaggagaattgcttgaacccgggaggcagagattgcagtgagccgagatcctgccactgcactccagcctaggcaacagagtgagactctgtctcagaaaaaataaataaataaataaataaataaataaattattttgagacagaatcttcctctgttgcccaggctggagtgcagtggtgcaatcttggctcactgcaacctccacctcccgggttcaagtgattctcctgcctcagcctcctgagtagctgggattacaggcacgtgccaccatacctggctgatttttttatttttagtagagacggggtttcgccatgttgcccaggctggtctcaaactcctgagctcaagtgatctgcctgcctcagcctcccaaagtgctaggattacaggcgtgagctactgtgccacactaagaatctttaacataccttcccctactgaataagcaccatgaaagaggggtttttgtctattttgttcattgctttattcccagagccttgaatggcgcctggcatctggcaggttctccttaaacagctaagtgagtgagattgaacctggaagactgaagtattcttgtgtgacaggaaatccccctgcactgcactcctctcctagcattgtctcctcggtcctttggcctgatgtttattgctgttccagcttcccttaaaaataccaacagcctttctactgaacacttgcttactgtgtgtcaggtactgttccaagcactttaactcatttagtcctcacaacagtcctttgaagtgggaagtatcataatccccatttttcagacaaggaagttaaggccaagatatttctgtgtttctcagtaagctcctgataaggtctgaatttttttttgtttgtttgttttttgttttttgttttttgctctgttgcctgggctggagtgcagtggtgccatctcagctgactgcaaccttcgcctcctgggttcaagcgattcttctgcctcagcctcttgagtagctgggactacaggtgcgcaccaccatgcccagctaatttttgtatttttggtagaaatggggtttcctggccaggcgcagtggctcatgcctgtaatcccagcactttcggaggccgaggtgggtggatcacctgaggtcaggagttcgagaccagcctggccaacatggtgaaaccctgtctctactaaaagcacaaaaattagccaggcgtggtggtgggcgcctgtaatcccagctagtagggaggctgaggcagaattgcttgaacccgggaggcagaggttgcagtcagctgagatctcatcactgcactctagcctgggtgacagagcaagacaatgtctcaaaaaaaaaaaaaaaagaaaagaaacaaagaaatggggttttgccatgttggccaagctggtctccacctcctggcctcaagtgatctgctcgctttagcctcccaaagggctgggattacaggcatgagccgcagcacctggcccctgataaaggtccaattttgaatcttggcaattgggctctgaatccacgctcttaacccgttctgctctctgtttggtagcgtatccagtatgccaagaccgactcagatatcattgccaagatgaaaggcaccttcgtggagcgggaccgcaagcgggagaagaggaagcccaagagccaggagaccccggccaccaagaaggctgtgcaaggcgggggagccacccccgtggtgggggctgtccaggggcctgtcccggtaagccaggtcccggagaccaaccctcccactgccagaccttcctcagccacatggactggctttgggacagggtggggagagttctccccttggggcttcagacccctcctttccatttctttatagagatgtgtttctctctctcttttggggggtattgagcacctagatgatgctatctcctttcgaaactcttgttccctccttgtgactgtttctcaaggtctttcttcatggctatgacttggtttcgctctctccgtggccttgattttgtcgcctgtgtcttgtaactcattgtgcatgtagaaaatccaagtgtctactaagcaactgttaggattaataagtgaacttaaatttagaaagatcgctggatataaaggcaatatggaaaaaaattagttttatttatttattcatattatgttttgagacagggtctcactgtcacccaggttggagtgcagtggcgccatcacagctcactacaacctccgcctcccaggctcaagtgatacgcctcagcctccctagcagctggaactgtcagtccgtgccactccacccagctaacttttgcattttttgtagagacggggcttagccatatcacccaggctagtctcaaactcactgtctcagcctcccaaagtgctaggattacatgcatgagccaccatggctggcccccagttttatttttatatgccagtaacagaccagtagacttcacattgaaaagtagcactgaggggtaaatccaacaaaaggtttgcagaacgactacactgaaatcacagaatgtagctgggagaaatcagagactcagcaatggataggaagactcagtattgtcaagaggtcagttccatccaaattaattgaagattcaacgtgattgcaatcaaaatcccaccaggaatttcggtaaacactggacactgattggctctttctaaatgtgtggaaagacaaggccaagccaggcgaggagaataaagcaccaggacctgcatgaccaggggaagctccagcaaccaggccaggcccaatggctcatgcctgtaatcccagcactttgggaggccaagataggaggattgctttaggtcaggagttcaagaccagcctctataaaatagcaagacctcatctctacaaaaaataaaatagaaaactgggcgtggtgactcattcctgtagtcccagctgctcaggaggctgagctgggaggatcgcttgagaactggaggtcaaggctgcagtgaacagtggttttgtcactgcactccagcctgggtaacagagtgagaccttgtctcttttttgttttgttttgttttcttttgttttttttcgggagggagtctcagtcaatctgtctccccaggctggaatgcagtcgtgcaatctcggctcactgcaacctctgcctctcaagttcaagtgatcttctgcctcagcctcccaagtagctggatcacaggcacatgccaccacgtccatgtgcaaaaaaaaaaaaaaaacctgcagcaaccaaccaggatgatatacagttggcagaagggtaggaagacagaccaaggggacaggatgaagagtctaggtacagctacacttgtataattacttgatgtgtgatcgaggtaccactgcacttcactgaggaaaggactttttttcccctagttcatgatgcggggcagttgggtatctgcaaggggaaaaaattagccctacctcatactatatgcaaaatataacttgaagtgaattgcagatccaaatgtgacaactcacaaaatatagtttcttttctcttttcttttctttttctttttcttttttttttttttttttttttttttgagacagagcctcgctctgtagtccaggctggagtgcagtggtgtgatctcagctctctgcaacctgcgcttcctgggttcaagcgagtctcctgcccctgcctcccgaggatctgggactacaggcatgtgccaccacacccagctaatttttgtatttttagtagagatggggtttcaccatgttggccaggctggtctcgaactcctgacctcaagtgatccgccctcctcaccctcccgaagtgctgggattacaagcgtgagccactgcacccggccctcacacaataaagtttctagaagaaaacaggaaaatgtctaaatgaccttggtgagggcatgaaaagtggaaacatcctgttttccaaacaggatacaaaaagcaccgagtacaaaagaaaagatggatgaaccaggcccactccttaggtctctgagcctccgtgtctctctggctttcatgagtctcatggctctgactgggtcatgctctattcggtgccactcacactttctccaagttggtgatggtgtctggattactgtgggctcctgttaacctctctcctcttccctgcacctagttttctgtccactttggacttcagattgtgattccagcccctgagtgtgctgcctgccatctgttgtcttccctcttccccttgctgccacgcgttttgttctgcacctgccctgagtgtccctttccatcactgccctcctttgtttttgtttttgttttttgagacagagacttactctgttgcccaggctggagtgcagtggtgtgatctcggctcactccaaccttctgttgccgggttcaagtgattctcctgcctcagccactctagtagccgggattacaggtgcccaccaccacgcctggctaatatttgtatttttggtaggggcggggtttcaccatgttgcccaggctggtctcaaactcctaacctcaggcgatccgcctgcctcggcctcccaaagtgttaggattataggcgtgagccatcgtgcccggcctaccacacatttctttctgcacctgccctgactgtccctttccatctcttcctctcctttgattttgtttaagagacagggtcttgctctgcctcccaggctggagtgctgtggcacaatcagagctcactgcatgcagtcttgacctcctgtgctcaagtgatcctcctacctcagcctcacaaatagcatttaactctttctgatttaatgtcccactagaccctgggtttgttttgctctgtcgggccctctttgggtgccttttgcgcctctttctgggtgtttttccttacatctctcacccgctaggtttcctttcatggcctcttctctgcctcctggggctgctgtaaccacgcactctcctccctctctccacagggcatgccgccgatgactcaggcgccccgcattatgcaccacatgccgggccagccgccctacatgccgccccctggtatgatccccccgccaggccttgcacctggccagatcccaccaggggccatgcccccgcagcagcttatgccaggacagatgccccctgcccagcctgtgagtatctagtcccacccaccaggtctcatataaatagtgagaatacaggactagaaagggaccagttggggggctgctgtaggttgggtggtctgggcaggccccctgaggaggtggtactgaatgaggaagtagcagtgggggtgggccctgggcagaggaattggcatgctggttggagggtacggaaggttagggtaggctggagtggtgccagcacctagattgattccatgagctattgagcgcctccttacgtgccaggccccgttctgcactgtagggctgcagcagggactgagatagaaacctctgctgtcctgtggcctatagtctgtaggggcaaagaggtgggaggcagacaggcaacagacaacaatatgtggtatgttgggtggaagtaccagagtgaattcaagcagggtgagggatggaggaagtggcagtactatgggtctcccactggactcagggctcttgtgctcaccgactcccctatacccccgcagctttctgagaatccaccgaatcacatcttgttcctcaccaacctgccagaggagaccaacgagctcatgctgtccatgcttttcaatcagtaagtggggcctgtggctgggtggtccctggagggtgatggccaggaggcatctccatggaaacaggcctcagaactctgccagcagagctctgagccaagtagggctttgcagaagggacagcgaccaaagatgtgaaaggaggaggctgtggctgggcccacggcctgtgggggacatgggggtgaggctggaaaggtctccatggccagggcttgccggcttttttcagccttgtttgagggctgagggagtccaggctctgggcctcattttcccagcccctaaaatgggggcatgcaaggcaaggtatgtgtaaaactgcattgagatgtccttgaacattggctaagactggcagaagtcagcgtgctcagaaacagcaagtgtgggagatggggatgcgtgaaactcttgtgcctggcgtcagggtggaggccggtgcagccgatgtgtagaggggctgttcaccattgttgagtgaagtcgtgggtgtgggtgagttcatctggtggttctgtttcaggggctgtgagtggggcattcgtcagtgtttgtggtggggagttggagggtgtctgggagaagggatggctacatgcagcatctcaccatgctgcactgcgtggcacttagaagaacagaaagcgcaactttataatagtgccgagagaagattgtgagaacctgaaaaatacagaaaaacaataccacatgtgcagcctgtccacaaagctgtatattttgtgagaatgccgatggaaaaaaggatacctagtaaacatgaggatggctgcttaatggagaaagaagtatggaatgagaagagggaaattagagaaacagcatatcagaaaagtgagggtaaggccgggtgcggtggctcacgcctaaaatcccagtatgttgggaggctgaggcaggtggatcacttgaggtcaggagttcgaggccaatgtgggcaacttggtgaaaccccttctctcctaaaaatacaagaataaaaatggaaaaagtgagggtattggttatttttttggtgtggcgggtgggttatgatttaggaagggcccaggagactgcggtgtactgtttcttgatttaggttgcagttgcatgggtgtttgtgtttaaatttttcattaaatgctatgtttacattagagtttttcaacttagtactatctgcattttgggctggataattctgagtaatggggccctgccctgtgcattggaggctatttggcatcatttctggcctctgtccacttgatgccgttacgttagggggaaatgctgagtccctgaggtctgtcgttctctttcaggttccctggcttcaaggaggtccgtctggtacccgggcggcatgacatcgccttcgtggagtttgacaatgaggtacaggcaggggcagctcgcgatgccctgcagggctttaagatcacgcagaacaacgccatgaagatctcctttgccaagaagtagcaccttttccccccatgcctgccccttcccctgttctggggccacccctttcccccttggctcagccccctgaaggtaagtccccccttgggggccttcttggagccgtgtgtgagtgagtggtcgccacacagcattgtacccagagtctgtccccagacattgcacctggcgctgttaggccggaattaaagtggctttttgaggtttggtttttcacaatcatttgtctgtctgattttcttgctcttcatggttcctttccctccacctcagcagcacatcctgggtttttggacctcttggcattttgaggtttgcaaccttggggaaacataggatagtgtagtaatattgttcaaactcaggttacaatgactactttggcagttttgtatgttgtcccaattcacagcaggaaatggaatcctgggtcaggaaatggaaagtcagggctgccgcgtacagttaggcaggatgggtactgcacaagaatggcaccttttaagggcacaccattcactttgtaggcttacaagtttatgccaccacttttctaacagatgacaagagtgttcagggagaggtgtttcttcaccttttttttactcttctcaaaagtgcagcctgttgtagcaatggccccagagaaaccacagtaggtagttcaaacagaaaggaatttaatacaggaaacttggtgctgctgaaatcatggggcgtgtgggtggtaggagtggcggtctgggtttgagactcttgagttcgagtttgcagcccccgaatgagctcctagctagagttcagcgggatgccactctggcttccggcagtgcctggactcatttggtcactcctgggaagctactgacttgatgctggtatgaggggtgtggccgcctcacacacaggtgatctactttcctggccagtggccagccaggagcttcaggcaggtgcctgaccccaattcccctgcagtgtctagctgcagggaagtctaggatatgtgacttctggctgtacagccacaaacccagctgcagctctggattagaaagggagattgggcagggtggctcacgcctataatcccagcaccttgggaggccgaggtgggcagatgacgaggtcaggaattccaaaccagcctgaccaacatggtgaaaccccgtctctattaaaaatacaaaaaaaattagctgggcataggggtgcgtgcctgtaatcccaactactcaggaggctgagacaggagaactgcttgatcccaggacggggaggctgcagtgagccaagattgagccactccactccagcctgggccacagagcgagactcaaaaaaaaaaaaaaaaaaaaaaaaggttgagtcaggcgtggtgtctcacacctgtaatcccagcactttcggaggccgaggcgggcgcatcaccagcggccaggagttcaagacaagcctggccaacatggagaaaccccatctctactaaaaatacaaaattagccaggcgtggtggtgtgctccggtaatctcagctacttaggaggctgaggcagaagaatcatttgaacccaggaggcggaggttgcagtgagtcaagatcgtgccattgcactccagcctgggtgacagtgagactccgtctcaaaaaaaaaagggaagggagattggttggggggaccatccttaggagtttgtcacatccctgtcctggggaattttaaattgaccaaaaataatatgcacatggcccggtgctgtgactcacgcttataatcctagcactttgggaggccgaggtggacaggttgtctcagctcaggagttcaagaccagcctgggcaacatggtgaaaccccatctctattaaaaatacaataaattggccaggcgtggtggttcattcctgtaatcccagcactttgggaggccgaggtgggtggctcacctgaggtcaggagtttaagaccagcctggccaacatggtgaaaccccgtttctacaaaaatacaaaaatcaaccaggcacgggtggcgggtgccaatcccagctactcgtgaggctgaggagggagaatcgcttgaacccgggaggtggagattgcagtgagccaagatcacgccattgcactctggcctgggcaacagcaagaatctgtctcaaaaaaaaaaaattagctgggcatggtggtacacacttgtcccagctacttgggaggctgaggcataagaattgcttgaacttgggaggcagaggttgcagtgagccgagattgcaccactgcactccagcctggatgacaaaaagagtgagactccatctcaaaaaaaaaaaaaaaaaaagtgtgtgtgtgtgtgtgtgtgtgtatatatatatatatgcgcatgcgcatattacttaagaccctttctcacaccaggtacatggaaaaaggcaatcttttggcaaaaagtagatctaccactaaatacagtaggccaggtgcggtggctcacgcctgtaatcccaccactctgggagccaaggtgggcagatgacgaggtcaggagatcgagaccatcctggccaacatggtgaaaccctgtctctactaaaaatacaaaaattagttgggcgtggaggcgcgtgcctgtaaccccagctacttgggaggctgaggcacgagaatcgcttgaacatgggaggcggaggttgcagtgagccgagactgcaccactgcaatcaaccagcctggtgacagtgagactctgtctcaaaataaatacatacatacatgaatacagtaaaacatactaaatttttccttgttttttgagatggagtcttgctctgttgcccaggctggagtgcagtggcatgatctgagctcactgcaacctccgcctcccaggttcatgcgattctcctgcctcagcctcctgagtagctgggactccaggcacccgtcaccatgcctggctaatttttttttttttttaaggcggggttttgctcgtcacccaggctggagtgtagtggcgcgatttctgctcactgcaatctctgcgtcccgattctcctgcctcagcctcctgagtagctgggattacaagtgcatgccaccacacctggctaatttttgtatttttagtagagacagggtttcaccatattggccaggctggtctccaactcctgacctggtgatctgcctgccttggcctccaaaagtgctgggattacaggtgtgagccaccgcgcccgggctttttttttttcttttttgagacagagcctcactctgtcacccaggctggagtgcaatggcatgatcttggctcactgcaacctccgcctcctgggttcaagcaattctcctgtctcagcctcctgagtagctgggactacaggcacccgccaccatgcccggttaatttttgcatttttattagagacggggtttcaccaagttgaccaggctggtctcaaactcctgacctcaaatgattcacccacctcggcctcccaaagtgctggaattacaggcgtgagccactgtgcctggctaaacatactaaattcttattttcctgccaaggctctaggcccaatcctgctcatgccctgctctccctgttcacgaggaatgtcaatattaaaagcagtgaagatacagggcaccccatgcagacctcctccacttgtgatgggaaagatgggaacgacaggaattgccctctgcagtaaatgacgtttattgctgacaggcaaggggaaacatctcgcccaccatactggcaaccacaggcctactggctattaagtatgtgcgttccgtggtcagctggtcctggtttctgctttctggggacttcatagctgttagcccatgggcagttgatgtccccagtctgagttttgtttacttcctgtgtaaagagtagtccctctatattaataccatgatgatgtttgtactcattacccatcccctagcacacactctctccctttcagtcacttagcaagcactcaataagttcagcaaatatttgctgggtacctattgtgtgctgcatacttttgtagggacaaggtatgcagtgattaataaaatagagaatttccagtattgtgttgtgatgaaaacaaaactgatgtggtggggccagcatactgagaggccgaggtgggagggtcgcttgaggcaaggagaccaacctgggcaacaaagtgagacctcatctctacaaaaaaaaaaaaaaaattaaaaattagccatgagtggtggcatgctagttgggagcctgacccagggggttcactggagcccagttcaaggctgcagggagctatgatggtgccactgcactccagcctgggtgacagagtgagaccccatctccaaacaaaaaacaacctaggctgggccaggcacaggggctcacacctgtaatcccagcgctttgggaagctgaggtgggtggaacacttcagatcaagagtacgagaccatcctggccaacatgctgaaacactctctctactaaaaatacaacaacagccgggcgcagtggctcatgcctgtaatcccagcactttgggaagccgaggcgggcggatcacgaggtcaggagatcgagaccatcctgactaacccggtgaaaccccgtctctactaaaaatacaaaaaaattagccgggtgtggtggcgggcgcctgtagccccagctacttgggaggctgaggcaggagaatggcgtgagccattcgggaggtggagcttgctgtgagccgagatcgcgccactgcactccaaaatccagcctgggcgacagagcaagactctgtatcaaaaaaacaaacaaacaaaacaacaacaacaacaacaaaattagttagacgtggtggtgcatgcttgtaatcctagctacttgggaggctgaggcaggagaatcacttgaacctggaggtggaggttgcagtgagatggaggtgcagtggcactgcacactccagcctgggtgacagagcaagactccaaaaaaaaaaaaaaaatcctgatgtgaagcgggtgatggggttgggaacagtaatgagtggtccagaaaacccttctgagaaggtgcatttgagctgagctcatggtgcttggtgttgggtttgtagacatggcacagacctagtcttcatccctgacaaactcttccctggccccaagcctgtgtgtgtccatcctcttctaaaaaaagcttggacttgccagtctagaggtgagggtccctgggagcaacgtggaccctctggagaaggacgcttagcctgtggatctccgaagcacactttggaggtgagagatgaaaaaaaagaggccgggcacggtggctcacctctgtaatcccagcactttgggaggctgaggtgggcagatcacttgaggtcaggagatcgacaccagcgtggtgaatatggtgaaacccgtcgctactaaatatacaaaaattagccaggcatggtggcacgtgcctgtagtctcagctacttggaggctgaagcagaattgcttgaacccgggaggcggaggttgcagtaagccgagatcatgccactgcactccagcctgggcgacagagtgagattctgtctcaaaattttaaaaaattaaaaaaaaaaattgtgcttctcagtggccctgctcctgtggctgcaatatggaggaagagtacaaagggtgggtacaaagactggcctctgtcttgctgttgggaaatccagctgccacgttgtgagcttgtgtctggaattggttccttctggtgggttcttggcgtcgctgacttcaagaatgaagccatgcaccctcgcagtgagtgtcacagttcttaaagatggtgtgcctggagtttgttccttcagatgttcagatgtatctggaatttcttccttctggtgggtttgtagtctatgctgagttcaggagtgaagccacagaccttcgcggtgagtgttacagctcataaagataatgtggacctatagaatgtgcaacagcaaaatttattgcaaagagcaaaagaacaaggcttccacagcatggaaggcgccctgagccagttgcagctgctggctagggtggcctgcttttatttccttatttggtcccacccacatcctgctgattgatccattttacagatagctgattggtccattttacagagtgctgattggtctgttttacagagtctgattggtccgtttttacagagagctgattggtgcgtttacaaatctttacctagacacagagcgctgattggcgtgcttacaatcctttagctagacacagagcgctgattggtgcatttacaatcctttagctagacagaaaagttctccaagtcccctacctgattagctagacacagagcactgattggtgtgtttacaaacctttagctagacacagagtgctgattggtgcatttacaatcctttaggtagacagaaaagttctccaagtcctcaccggcccagaggcccagccatcttcacctctcaagctgtctgtagaggtccacgtgtcaagaaaactgaggacagaggccctcagtccagttcccacaagcaactgcatctccccaacagctgcctgaatgagtttggaagcagtcctcccaccattcagccttcagatgaaactgcacccctggctgacaggctgattgcagccttatagcagaccttaagcctgagacattcgacccacagaaaaggtgataattttggtctttttttttctaaacaggttcttgctctagagtgcagtggcacgatcatggctcactgcggcctctacatcctgggttcaagtggtcctcccacctcaacctcctgagtggctgggactacaggtttgtaccaccatgcacagctagtttttctctttttttcttctttttgtaggtacaagggtctccctgtgttacttaggctggtctcaaattcttaggctctagcaatcctcctgtctcagcctcccaaagtgttgggattacaggcatgagccactgcactggggcaatgttggtcttaggctaattatgcagcaggagatacatgcactgtgctttgggaattgaagtcacttctatttctttgtggcttcatcagtaatatggggcagggggcacggttcccacagctgattcttgagtgttctttctgagtatccttaatacttcacacactatcatatatctgaactttgttcattgattatctcccctttaattttcattccttgatgaatctccagggtctggattaagtcctaggatactttatgtactcatgaaatcttcaatgaatgaagaaatgattttttttttttttgagacagagtctcactctgtcacccaggctggagtgcagtggcatgatcttggctcattgcaacctccacctcccaggttcaagcaattcttctgcctcagcctcctgagtagctgggactacaggcatgcgccaccatgcctggctcatttttgtatttttcagtagtgacagggtttcaccatattggccaggctggtcttgaactcctgacctcaggtgatccacccacctcagcctcccaaagtgctgggattacaggtgtgagccactgcatccggcggatttttttttttttttttttgagacagggtctcactctctcgttcaggctggagtgcagtggcgtgatcttggctcactgcagcctccacctcccagtttcaagtgattctggttcggcctcccaagtagctgggactacaggtgtgtgccaccatgcctgtctaatttttgtattttcaccacgttggccaggctggtctcaaaactcctgacctcaagtgatccgcctgcctcagcctcccaaagtgctgggattacaagagtgagccaccatgtctggcctgaatgaagaaataattttttaaagagtgttttaaagtggggccgggtgcggtggctcacacctgtaatccccacacttttggaggccaaggtgggtgggtcacttgaggtcaggagtttgacaccagcctgaccaacatggtgaaaccccatctctactaaaaatacaaaattagctgggcatggtggcagatgcctgtaatccccgctacttgggaggctgaggcaggagaatcacttgaacccgggagggggaggtcacagtgagctaagatcgtgccattgcactccagcttgggtgacaagagcgaaacaatgtctcaaaaaaaaaaaaaaaaaaaaagaaattgcatttcaaagccaggtgcagtggctcacacttatagtcacagctacttaggaggctgcggtgggagaatagcttgagcccagttgttcaaggctgagtgagctgtgattgtggcactgcactctagtctgggtgacagagtgagaccctgcctgtaaaaaaaaaaaaatctttcaggccagacgcggtgactcactcctataatcccagcactttggaacgccgaggcgggtggatcacctgaggtggggagttcgagaccagcctggccaacatggacaaaccctgtctctactaaaaatacaaaaatagccgggcatggtggcacatgcctgtaatcccagctactcgggaggctgaggcaggagaattgcttgaactcgggaggtggaggttgcagtgagctgagattgtaccactgcaatatgagactccatctcaaagaaaaaaaagaaaaaaaaaaaaagatagcatagcaatggctgtgggcctggatacaagtcttagcctctccacttctccacttcctggctctgtaagccttagacaagttccttaactccacacttccatttccatgtaacaaggggttataggccaggcattggtggctcatgcctgtaatcccagtgctttgggaggccaaggcgggaggatacttggggacaagagttcaagaccagcccaggcagcacagtaagacattggctctagaaaaataaaaataaaagaaatcatccaagaatggtgacttgcctactattctactcgagaggctgagaggggaggatttcttgagcccaggagtttgaggatgcagtgagctatgatcacatcactgtacttcagcctgagcaacagcaagatcctgtctcaaaaaattaaattaggctgggcttggtggctcatgcctgtaatcccagcactttggaaggccatggtgggcagattgcttgagcccaggagtttgagacgaggctgggcaacatgacgaaaccccggctctaccaaaaaatacaaaaaattaactgggcataatggtacatgtctgtggtcccagctactcggtaggctgaggtgggaggaatgcttgagcccaggaaataggggctacagtgaaccaggatcatgccagtgcactccaacctgggcaacagagcaagactctacctcaaaataattatttaaaaaaatggattaattgggcataggtggcttgtgcctgtagtcccagttactcaggaggctgaggtgggaggattgcctgagtctaggaggttgaggctgcagtgagccgggatggcaccattgcactccacctgggcaacagggtgagaccctgtctcaaaaaagaaaaaaaagggaggggttataatcactcctcctgacatgatacagagtatccatttgagttcataacataaatatgtacttggtgaatgctctgtaactattggcttttttattgttcccattttacatataaggaagctgaggctttgtgaggagaaatagcttagcccaggtcatccagtgggaagcgtctggtgcagaggaatagtgatcatggtgggactttgcctagcctaaggttcagcatacaatattcagtcagtactcaagggctgggctgtttctggtaatcaaagggctgccttgttctcctgccccacagcacaggaaattccaaggtggttttctttacaggctcctccgcttctgtggccagaggggacagcggaggagcccaggtacctaagccaactcaagagaagatggaattgaatatttcaaccaccttatctaggcctctgtgattgttgaggagggggctgtcactgggaaagttgtgagctgctttggaccttatctgggaatttccttgggcttacagcctttaccctatccttgaaatggttctggtttcatagcaacttctaggtggtgtgggcgaagtttgggactggtttagggcggggacaagaccaagaacacaagtttccttgtactacgggagagagggaggggaggaaattggagaccccagcacccccttgctcactctcttgctcacagtccacgatggcccggtccctggtgtgccttggtgtcatcatcttgctgtctgccttctccggacctggtgtcaggggtggtcctatgcccaagctggctgaccggaagctgtgtgcggaccaggagtgcagccgtaagaatggggaggggagaattgggggcttgggcgttagcctgtgtggagggtgctgcattcccttctattccttccctagaccctatctccatggctgtggcccttcaggactacatggcccccgactgccgattcctgaccattcaccggggccaagtggtgtatgtcttctccaagctgaagggccgtgggcggctcttctggggaggcagcgtgagtcttgggagagtgaaagagggaagggtacagagctggggtagactcattatccccatgaagggaagatttgaggggggtgaactgaaatagacattgtggggggatattgttacttactttattttatttgcttattattttttaattttttccgagacagagtcttgctctgtcacccaggctggagtgcaatggcacgatctcggctcactgtaacctccacctcttgggtttaagcgattctcctgcctcagcctcccaagtacctgggattacaggcatgcaccaccacacctggctaatttttgtatttttagtagagacagggttttaccatattggccaggctggtcttgaactcctgacctcatgatctgcccgccttggcctcccggagtgctgggattacaggtgtgagccactgccccccagcctattttcactttatttaccaattttaggacctgatatggtcccacgttctgttctagacaccaagatacaacaacaaatgatcctttttattctaatggagggaaatgaacaaaaagcaaggcataaaaaatagcagcagccgggcacagtagctcacacctgtaatcccaagtaaggccaagttgggaggatagcttgagcccaggagttcgagaccagcctgggcaacatagcaagacccccatctctataaaaaaaaatttaaaattaactgggcttcatggcatgtgtctgtggtcccggctactcgggaggctgaggtgggaggattgcttgatcccagaagttgaggctgcagtgagccgtgatcatgctactgcacctcaacctgggcgacacaatgagaccctgtttccaaaataataataataataaaagcaaatatgcgctgctgtgagaattaacagagacttacttgggtgttcagaaagggcctctgaacaggtggcatttaagctgagattcatatgacaaggatggagcagttatgtggagatcagggagaagggagaatgcaaaggccttcagcaggcacaagcttgccatcttcccagaccctagcttttaactcctcttccccaggttcagggagattactatggagatctggctgctcgcctgggctatttccccagtagcattgtccgagaggaccagaccctgaaacctggcaaagtcgatgtgaagacagacgtgagtgtcatgggggctggcaagaaatgtggggggaggacccttaggttgtggggatgggcaaaaatgctcccacacttggctccctggcagcctaggtatgtgcgctgggagaaattctttccctgcctcaattttctcaccagtaaaatgggtccagttgggaggtgcaaagattagagggctctaggctaatttgcatagcacttgtgtggccagacctgggccctgcagctgcagcctttgctaaaaccactagatcctttgtggtgtgaccgctggttttctttccactgtttcccctttctctttttcagaaatgggatttctactgccagtgagctcagcctaccgctggccctgccgtttcccctccttggctttatgcaaatacaatcagcccagtgcaaacggctcgtctccgtggtctttggggtggggtagggtagggtggggactgtacaaatgaaatgtttctctaggttgctgaatctaaccaattaacccgctgcctgtggtaacgtcagtggttgctaggcagagtttcactgatgaaagccctgtgcagtaggagcgctcctaagcttaggtttcggacacaagcaaaggaaaacctaagcagcccaactaggggattgtagtgtcctctctagaccagtgggagggagccaatcggactacgcggaggatataaatcgcacagtaaaggttttcttggaagattatctggaaagggaggtgggaagtaacctgcgcctatctgcccagttttcctccttttcgcctttgagaacagtaatcgctcccgccagctcaagatcagctcctcttccagcctctttctgtcaatcctgcccgtgcccccttctttgcatttgtatcccctcccccaagtccgctccgatccaatccggagactcgactctgccccccgtactccagactaaatccgttcctcggctcagctaagcagctctgcacgtcccttcccacttgctcagccaatcgctgggctcggccccgcccctttgggcttggtccttctcacgccaccaatccgcgcctcttgtcccgccccctgcccgcgagtccgccaatcccgcccttcggaaagcgtcgcctggtatccagctgccggagcgggtcgcgccggaggggggcggaggcggaagtggcggtgccgggcccggggagtaggaaggagccggggctgtagccggagtggagcggctgccagccgaggagcaggcgcggccgcggcgccatattgcggccctcagcggccgcgaccgagtcatggctgagacctacggtgagggtggtggacgaagctggggtcctgggtctgggcccagggaggatgcggcctgtgggaatgggcggggctttgtagatcagggggcggggtctggtgtgatggaggcaggacctaagtggatgctgggaggggtttagtgggtctgaggctgagcttaatcgatttaggtggagcctgagggtctggtgcgtgggttaaatagatctggggcgggatttgagggagctggtcctgaggggttcagggaggccctgagggaagaggtgggccttaatggatctgggcggagcctgagtgaaggggcggggctgactgcatgaatggcaggagtcgggcttatgggctagagggaacactgaatggaagctcgggaccctggggctgatctggctggagagagctctggaatgggtttggggatgggctgtccttgagttaggggcaggacttagtggcaaagggtgggacttatgcatgagaatggagccgggttctgggcagagggagggaaggagaggtcgggaagtggaaaatcagtagggatgcaccataggaggtggtgattggaggcaggggaagtgcaggtttaggagtcagagggagccgcattcactcaacaaatatagaagagaagggagaagagtgcaaagaccctgaggtgagaaccagcttgtcattttcagggaatagactgaaggtcaggagctatagtggagtgaatgagtcagagggtggtaggaggtgaagaggaacaagggctatatcgtagtccttgtttaaatagctttcaagagactttagcgacaaaatagctaagatctgggactctggagcccttggcctaggtttgaatctcacttctgcccagctgtgtcactttgggcaagtcagttaacctttctggcctgttacctcatccggaaaatgggaataatttttagtctacctccctcatagagttttcctgaggatgatgtgagctgttgatgtgagtaaagacctttagaactgttcctggcccacaacaacacacaattgacccatgtaacaaacctgcacatgtgggctgggcgcggtggctcatgcctgtaatcccagcactttgggaggctgaggcaggcggatcacctgaggtcgggagtttgagaccagcctgaccaacatggagaaaccccgtctctactaaaaatacagaattagctgagtgtggtggcgcatgcctgtaatcccagctactcgggaggctgaggcaggagaattgcttgaacctgggaggtggaggttgcggtgagccgagatcgcgccattgcactccagcctgggcaacgaaaagtgaaactctgtctcaaaaaaacaaaaacaacgacaaaaaaacccctgcacatgtactccctgaatctaaaataaaagttgaaaaaaaatatatagaatgtgcctggcacatggcaagtactacataagagttatctgttactgttacctattggtttgtttctgcctatgtctgtttctctccctctaactgtgatggttagagagagagattggattggaatccatcttttttccctgtatctttctctccctgtgggtatccctgattttggctccatctggtcagacttcctcttcaaattcctggtgattggcagtgcaggaactggcaaatcatgtctccttcatcagttcattgagaataagtgtgagtttcccgcagtggtcctgggaaccctgagctgtgtttatgcgcatggtgtgggctggtgggcagccggtggggagggcagggctggccataggtacaagtccagtgctggctttttggtccttgctttgtcgtatgtcctttactaggttctccttgacctcaagtcactccagcaaggagaatgggtttgtagagactgagagggccttggaggatgggggatcctctgagctgtctcctctctccctgtactgccccttctgttcctcctactcccagtcaaacaggactccaaccacacaatcggcgtggagtttggatcccgggtggtcaacgtgggtgggaagactgtgaagctacagatttgggacacggctggccaggagcggtttcggtaggtgggctgggctcccaagggtgatggggagagagagtgagaaggaaagagagagatgtgtgtgtagagtcacttggagacactgagagggcagacaaggcagacagagagagatgagacaccgtagttagcaggtatatatatccaaggagagagggagtactggagagataaagagatggtggaagaaaaagaggtaggggccaggcgcaatggctcatgccggtaatccccgtgctttgggaggccatggtgggaagattgcctgagcccaggagtttgagaccagcctgggcaacatagtgagaccccatctcaaagaaagaaaaagagatagagaaaagtggcttgggggtggggaaagggatggagactgagagacaccgaaacagaaagagaaggggaaacttgagagactcacactcagaaaggaaaagagcaagagagacagagactaagagagttgaagagaatgataagggaggtaaggaggcctggcacggtggcttacacctataatcccagcactgtgggaggctgaggcaggtggatcacttgaagtcaggagttcaagaccagcctgccaatatggtgaaaccgtgtctctactaaaaaaaaaaaaaaaaaaaaaaaatcaaaaaatgtagccaggctgtggtggtggatgctagctacttgggaggctgaggcaggagaattgcttgaacctgggaggcagaagttgtagtgagtcaagatcgcaccactgcaccccagccggggtgacagagcgagactctgtctctgaataaataaataaataaataaatgaataaataaataaataaataaataaataaataagggaggtgaggagacacagagaaacagaggtcagaggcagagagggagacagggtgagtcagacaggtgtagttggacgttgaatgaatgaatgcacgaatttacgggaaggcaagggtgagcatgagagccacagagatggaacagaaagagagacagtgagaaatagggaactgaagacacacacgccaaggcaggagaaccgcttgagtccaggagtttgagaccagcctgggcaacattgtgaaatcccatctttccaaaagagagatggagaaatggacgtgttgtgggagagagagagagagaaatgcgtagggctcaacacactgtaggtcttcaggaaatgcctgcagagcagaaaagttgatagacacatagaaaccttaggagaggccgggcgtggtggctcatgcctgtaattccagcattttgggaggccgaggcgggcggatcacgaggtcaggagatcgagaccatcctggctaacatggtgaaaccccgtctctactaaaaatacaaaaaattagctgggtgtggtggcagacgctggaagtcccagctacttgggaggctgaggcaggagaatggcatgaacccagaaggcggagcttgcagtgagcccagatcgcgccactgcactccagcctgggcgacagagctaggctccgtttcaaaaaaaaaaaaaaaaaaaccttaggagagtcggagaaacagagagcagggagagaaatagagggaattcagtccacggaaaagtgtgatctatggcagcatctagtagctgctgagttaattcttgcgtatggattaactgcctgaggtgcacagagcccaaaggcagagagaggggctgaaggatagacaggtgtgtagcatgggctaggtttacggtgagtgcttagtaaatgctgtggaatgattgcatgagttccagaaggacccagactggtgagacagagaatgcagaattggctacactgggaaggagactccacctgacacagcaggagaaggataagcagatgttgtatagtgcttgggcagggccaggcaaaggggagatttgctcagaaaatgttgaatgaatgaatgcacaaatgcatgggaaggcaaaggtaagcatgagagagccacagagatgaaacaaacaaacaaaaaagacagaaatagggaattaaatagggccaggcacggtggctcacgcctgtaatcccagcactttgggaggcctaggcgggcagatcacttgaggtcaggagttcaataccacactggccaacatggcgaaaccccatctctactaaaaatacaaaaattagccgggcgtggtggtgcatgcctgtaatcccagctacttgggaggctgaggcaggagaatcacttgcatccggggggcaaaggttgcagtgagccaagatcacgccactgcacttcagcctgggcgacagagcaaaactccatctcaatcagtcaatcaatcaatcaatcaatcaataaaagacatgtagggccgggcacagtggctcacgcctgtaatcccaacactttgggaggccaaggtgggcggatcacttgagctcaggggttcgagatcagactggccaacatggccaaccccatctctactaaaaatacaaaaattagcctgatgtggtggcgtgcatctgtaatcctggctactcgagaggctgaggtgggagaatcacttgaacccgggaggtggaggttgcagtggttgcagtgagccgagatcatgccactgcaccccagcctgggagacaagagtgagattcctactcaaaaaaaaaaaaaaaaaaaaaaaaagaaaaaggaaaaagacacataggttaaggcaggagaatcacttgagcccaggagttggagaccagcctcggcaacctagcaaagccccatctttacaaaaaatattaagaaattagccaggtgtggtggtgcacacttgtagtcccagacactacataggctgaggtgggaggatctctccgttgggatactgagcctaggaggtcgaggatgcagtgagccaagatcgtaccactgcactccagcctgggctacagagcaagaccatcaaaaaaataaaaaataagacacacatgaaagagacacagagagaaaaacagacgaatggaaagatagggacacagggagagacaaaaatggagattcataaatagagacagctggccagctaagtgagatagaagctgagagaggcgaagagagagggacttcaaggatgcaagaagagagaggaattgcatggtgacccgaccaaggccaggttttgggggatgggccagcagtgaaggggggggcctccgaaccaccagtctgtctctgtagaggggggcattctcggggcagaccccagccttgggggtgactgggtccccctggccccacaggtcagtgacgcggagttattaccgaggggcggctggagccctgctggtgtacgacatcaccaggtgggtgcccggggtgggtggggtagggcatgggtggttcctctcctgcactgcctccctcccttctcccttctccacagccgggagacatacaactcactggctgcctggctgacggatgcccgcaccctggccagccccaacatcgtggtcatcctctgtggcaacaagaaggacctggaccctgagcgggaggtcactttcctggaggcctcccgctttgcccaggagaatggtgagggctgtgtcgtggaccaggtggtggtgggggtggacagtccacagggaccatgggtttactggctctcagtggctgtacccagcaggggaacgtggaggttcagaagtctgggttcaaatttgagtgttggctgggtgtagtggctcacacctgtaatcccagcagtttgggaggccaaggtgggaggactgcttgagcccaggagtttgagaccagcctggacaacacagtgagatcctatctctataaaaaatttaaaaaattagctgggtgtggtggctcatggctgtagtcccagctacagtggaggctgaggcaggaggatcacctgagcctgagagtttaagactgcagtgagctgtgatcacgccattgtactccagtctgggagacagagcaagacactgtctccaaaaacaacaacaacaacaaaacaacaacaaaactaagtgttgccatcagtgagctatgtgattacactggttctcagtttcttcatctggaaagtgggatcacagtgtttctgccccacagtgtgctgtgatgattaagggagattgtggaaagtccttagcacccgccacagagtgggtgctagattaatgttggccgctaaggtttcgcctaccgtcaggaggccgcacagggtattggttttttaaattaattattttatttattttttcctcctaccgcaccttcctgggtattggtttaatgtagagattgcaaccctagatggccctaggtgaaaggcacttttttttttttttttctgagacggagtcttgttctgttgcccaggctggagtatagtggcgcaatctcggctcactgcaacttctgcctcagcctcccgagtagctgggactacaggtgtgcgccacaacgcctggctaatttttatatttttagtagagacggggtttcaccatattggccaggctgatctcgaactcctgaccttgtgatccgactgcctcggcctcccaaagtactgggattacaggcgtgagacactgcgcccggtgaaaggcacatttttgaatacaggagatgggatggggtagatccttgagtaacaggtactggtgttaaggggagtgcagcatactgacaacccacaccaaaaggtttgcaagggccaaccacaatggctcacacctgtaatcccagcattttgggaggccaaggtaggagcatcacttgagatcaggagttttagaccagcctgtgtaacagagtgagaccctgcctctacaaaaaaaaaaaaaaaaaaaaagcctgggtgtggtggtatgtgcctgtggtctggggtactcaggaggttgaggcaggaggatcacttgtgcccagaagttcgaggctgcagtgatctgcaatcacaccactgcactccagcctgggggacagagagagactttgtctcaaagaaaaaaacaaaaaaggtttgcaagtataaactcatttgaaaacattgtgttggccaaaccacccacatctggtggcttgagatctgcctgtgttcccctgttttgcaacctccaggtttaaaggaggttttgccatcagagaggtgtgggtgtgaattcagctctgattttctgactgtggggccttgtcatgctgctgatgggtagactctggttggcctgttcctgtcctagatggtgctagagacacagtgttggagacagccctaggcccaaccttcatggagctcacagttcagtgggtgagggtggaaggacagacccacttccagacagtgacacctcaggaaggtcagggcttgatggtgaagcaccgggagacaggggtcagagccagcaggggagagccccagagggtcagggccagtactgggggggcaggcagagggatcggggtgggatggagaacacaggcagaggggtcagggctgggatagggcaggcagaggcagaggggtcagttgggatgaggggacacaggcagaggagttacatgggatggggggcaagggcagaggggttggggtgggatggggggcccaggtagaggggtcaaggccaagtttgggaggcacaggcagagcggttgcatgggatgggggagcatgggcagagggctcaggggtggaatggggcaggcctaggcagaagggtcaggggtggaatggggcaggtccaggcagaagggtcaggaaaggaatggggcaggcccaggcagaagggtcaggggtgggatggggacccaggcagagggttggggccaggatgaggaagcacaagcagtggggtcagggccaggatagggggccacaagaagctgtgggagccctaagtcggtacctgactcagcccaggaagtcagggaggacttcttggaggaggagctgtgtgagctgagctctgaaggaagagctgggtgggcatatcgggaagcggacattagtggcagggaaatggcatgcgcagaggcctgaggtgagggtaaggggggatggaacattggaggaacaggatgagagtcagcaggtgagagctcagtggagggtggggactaactggggccctgacctcagagtgtgtgcccctgcagagctgatgttcctggagaccagcgctctcacaggcgagaacgtggaggaggcgttcctcaagtgtgcccgcactatcctcaacaagattgactcaggtgaggccccgaccggcccgagtgggagcgaagggcaggcccgggggtctccaggcaaccaatgctgacctctccccttccccacaggcgagctagacccggagaggatgggctctggcattcagtacggggatgcgtccctccgccagcttcggcagcctcggagtgcccaggccgtggcccctcagccgtgtggctgctgagctctgtggagccaggtgggacactgggggctttagggaggcagggcggcctcttgggcatgggggagatggtgtggagatagacactgaacatgtgatgacaagagaaacagagtgagagaaagatgcaaaaacacacaagctaaaggaggcatctggctgggcgcagtggctcacgcctgtaatcttagcactttgggagtccgaggcgggcggaggcagttcattgggtgggggtggggagacagacccacttccagacagtgacagctcagaaaggtcagggccaggcctggctcggtggcttatgcctgtaatccctgtactttggaaggccgaggcgggcggatgacctgaggtcaggagttcgagaccagcctggccaacatggtgaagccccctctctactaaacatacaaaaattagctgggcgtggtggcaggtgcctgtaatcccagctactcgggaagttgaggcaggagaatcacttgaacctgggaggtggaggttgcagtgagctgagatcacaccattgcactccagcctgggtgacaagagcaagactttgtctcaaaaaaaaaaaagaaagaaaggtcaggaccagatggggaggcactgggggagaggggtcagagccagcaggggagaggcccaggggggtcagggccagggtcagggcacaggcagagggatcagggtgggatagggcaggcagaggcagaggggtcaggtgggatgaggggacacaggcagaggggttgcatttgatggggggtatacataaggtcaggagttctagaccagcctggccaacgtggtgaaacccctcctctactaaaaatacaaaaattagccaggcatggtggtacatgcctatagtcccagctacttgggagactgaggcaggagaatcacttgaacccaggaagctgagggtgcagtgagccaagattcagccactgcattccagcctgggcgacagagcaagactctgtctcaaaaaaaaaaaaaaaaaaaaaaaaaagagacatctgccaggccacagggaatccacctgcagccccaggccagcttcctgccctagaccttgaccctcccattcatagttctccagcgatttattgagcgcctgctgtgtgccaggccctgctcaaggcactggggatatggcagggagtacaacagactcccatcctcatggtgctgacattctctttgggggagacaggtgataaacaagagatgtaagtcgactgggcgcagtggctcacacctgtaatcccagcactttggcagggtgagatgggaagatcactttgagaccaggctgggcaacaaagcaaccttatctccacaaaaagttttttaaaattagcgaggcgtggtggtgtgcacctggagtcccagctacttgggaggctgaggtgggaggatggcttgagtccaggtgttcgaggctgcagtgagctgtgaccatgcgccactgcattccagcctgggtgacagagcgagactcttaaaaaaaaaaaaaaaaaaaaaagtaaagtatgtagtagtgagggaggtaagaactatggggaaaaataaaacaggcacagatgagtggatagggtggaggagtgtacttttttttttttctttgagatggggtattgctctgttacccaggatggagtgctgtggcgtgatctcggctcactgaaacctccgcctcctgggttcaagtgattctcctgcctcagcctcccgagtagctgagattacaggcgactaccaccatgcctggctaattttttttaatttttatagagacagggtttctttttttttttttttttttttttgagatggagtcttgctctgttgcccaggctagagtgcagtggcacgatcttggttcactgcaacttctgcctcctgagttcaagttgcctcagcctcctgagtagctggaactacaggcgcccgccaccacgcctggctaatttttatgtatttagtagagatggggttttaccatattggccaggctggtctcgatctcttgaccttgtgatctgcccgcctcggcctctcaaagtgccgggattacagtgtgagccaccgcacctggccgacacagggtttcatcatgttggccaggctggtatcaaactcctgacctcaagtgatccacccactcttggcctactaaaatgttgagattacaggcgtgagccactgcgcccggccaagaatgtacttttttttttttctgagatggagtttcactcttgttgcccaggctggagtgcaatggcgcgatctcagctcaccgcaacctctgcctcctaggttcaagcaattctcctgcctcagtctcctgagtagctgggattacaggcatgtgccaccacacccagctaattttgtatttttagtagagacggggtttctccgtgttggtcaggctggtctggaactcccgacctcaggtgatctgcccgcctcagcctcccaaagtgctgggattacaggcgggagccaccacgcccagcctttttttttttttttttttttgagacagagtctcactctgtcgccatgctagagtgcagtggcacgatctcggctcactgcaacctctgcctcctgggttcaagcaattctcctgcctcagtctcccgagtagctgggactataggtgcgtgccaccatgcccagctaatttttgtatttttagtagagacatttcaccatgttggccaggttggtctcgatctcttgacctcgtgatccgcccacctcagcctcccaaagtgctgggattacaggcgtcagccaccgcacctggccaagagtgtacatttaaacaagatgaggagggaagcctcgctgagaagatgacatttgagtgaaggaagggagatagggaggcctgtggggatctggggcaagagcactgctggagagcacagcaacgcttctagcgaggggtatgcctggtgtcggtgagggtgaccaaagcagccagtgtggtcatcatggaggacctgtgtgtgttttgtgggtacagcatgagatggggtcaggggttggaggaagcagatcagttagggcctgtgggccctggggaggcctctggcttataccctgtgtgggagccatgggaggcttctgaacagaggaaggacaggatcagattcaggggtgcagagagttcctctggctgcataaagggaaggggctgtgagggacagaggaggtcaccaggacaccagagaggaagctgctgcaaagtccagggaagatggtggaggacaggacaagggggcgggaagaggagtggctgagaagggaatagggttcatgtcctccctagactctctgtcttccagtcttggcctctctcttttttttttttttggttcctgtctttttattttgagacagagtctcgctctgtcacccaggctggagtgcagtggcgcgatcttggcttactgcaagctccgcctcctgggttcatgccattctcctgcctcagcctcctgagtagctgggactacaggcacccgtcaccatgcccggctaattttttgtattttttttagtagagatggggtttcacggtgttagccaggatggtctcgatctcctgacctcgtgatcctcctgcctcggcctcccaaagtgctgggattacaggcatgagcctttcctttttttttttttttttttttaattttagagagaatctcactctgctcactctgtcacccaggctagagtgcagtggcgccatcttggctcactgcgacctccgcctcccgggttcaagtgagtctcctgcctcagcctcccaagtagctgggattacaggcatgtactgccacaaccagctaatttttgtattttttttttttttttggagatggagtctcgctttgttgcccaggctggagtgcagtggtgcagtctcggctcactgcaacctccgcctcctgggttcaggtgattcttctgcctcagcctcccgagtagctgggactacaggtgcgtgccaccacgtctggctaattttctgtatttttagtagagatggggtttcaccatgttagccaggatggtctcgatctcctgacctcgtgatccacctgcctcggcctcccaaagtgctgggatgacaggcgtgagacattgcgcccggccaatttttgtatttttaatacagacagggttttgccatgctcgtgaggctggtcttgaactcctgacttcaggtgattcacccgccttggcctcccaaagtgctgggattacaggcctgagccactgtgccctgccaatcctgtctccttttgatgcagccactgggtctttctaacacacatatctgctcctgtcgctccctttttcaaaaccatccatgcatctcagggccccaggacacaaatgaactcctcagcctggtgtttgaccctctgcagggactggcccctgccagcccagccttaccggcctcagccacttgtcggtctccctacctctcaggccactccagccacactgaagttcttcccattcctctgggcccttgctcatgctgggcctctgcttggaacattcctaccctcttttccctggcaacctccttcctccaggcagcactacttgttcctccaggcttggtccaaacttttgtttttttttgagatagagtctctgtcactcaggctggagtgcagtggcgtgatttcggctcaccgcaacctccgcttccaggttcaagcaattctggtgccccagcctcctgagtagctgggactatgggcatgggccaccaacgcctggcaaagtttttatatttttagtagagacagggtttcaccacgttggccagctgctcacaaactcctggcctcaagtgatccacccacctcagcatccaaagtgctggaattataggcatgagccactgcacccggccccaaacttcttgacaggctttcaaaaccctgcaggatttggtcccatccctccttctctgggggatgtgtatgtcttgccagttctcccttctatacttcatgctaaatcccctcccagcccttggcagctccagggtgggacaggtggggaacaagtggttagaccttggatctacttggaaggcagagccaacgtgatttcctgatggaatggatgtgtaatctgaaagagagagaggaatcaaggatgatgtcttcagacagtgctctcttgtctttccaggactttgcacctgctgtgcctgagcctaagtttgctcatctgtaaaatgaggctaataatagcacctgcttctatagatgttgagaagaagaaatacattaattcacgaaagtgctcagaatggggcctgatggtcaagacttgatcgatgagggctgtttttaaagttttcttcttatccatctttgggctgagctcaaatgaatgggtgtgtcttcttcacctcagggcttagcagagactctgtcctagagagtttgccctcagtaggtgaaatgtaacaaggcaaggcaaggctttttcacactttgctgactgcaatctacaggaggaaatatattttatgtgttaatcaaggactgactgtagcagatcccacccacatataaaactcaaacacacattttcctaccaccagtattctttcgtttcttggcactaaaatgaaagtcacataacatacatttacgtgacttttcaaagtgtacaattcagtggcattcagtacattcacagggttgtgcaatcaccacttctgtgttgttccagaatgttttctttttttttcttttcttttttttggagacagagtctcgctctgttacccaggctggagtgcagtggtgcgatcttggctcattgcaagctccacttccagggttcaagcaattctcctgcctcaacctctggagtagctggaattacaggcatgcaccaccacacccggctaattttcgtatttttagtggaaacggcatttgaccgtggccaggctggcttgaactcctgacctcaggtgatccacccgcctcggtctcccaaagtgctgggattacaggtgtgagccactgcgcccggcctcagaacgttttcattactctcagaggtgccatgcttatactgctttgtaccttatacctttgtacccatatttattaagcagtcactctccatttcccccaacccctagcaaccaccaatttgttttctgtctcttttggccaatatgatattcttttccttttccttttttttttgagaagggtctcactttgtcacccaggctggagtgcagtggcaccatctcagctcactgcagccttgacctcctgggctcaagtgtttctcccacctcagccccccaagtaactgggactactggtgtgcaccaccacgcccagctaatttttatatttgtattttttgaagagatggggtttcaccatgttgctcaggctggtctcgaactcctgagctcaagtgatccacccacctcagcctcccaaagtgctggaattacaggtgggagccaccatgcctggcctcttttccttttttcttttcttttcttttttgtttttttttttttttttttttttagatatggtctcactgtgttagcggggttggtcttaagctcctggccttgccgggcgcagtggctcacgcctgtaatcccaccactttgggaggctgaggcgggcagatcacgaggtcaggagttcgagaccagggtgaccaacatggtaaaaccccacctctactaaaaatacaaaagttagccaggcgtggtggtgtgctcctgtaatcccagctactcagggggctgaggcagaggaatagcttgatccctggaatcagaggttttagtgagccgagatcgcaccactgcactccagcctgggcgacagagctagactccgtctcacaaaaacaaaaacaaacaaaccaaaaaaaccaaaacaaaacaaaaaaactcctggcctcaagcaatcctccacctcagcctcccaaagtgctaagattacaggcatgagccaccgagcccagccaaccaatataatatatctttttaaattattattattattttttgagatggagtttcgcttatgttgcccaagctggagtgcaatggtgtggtctcggctcactgaaatctccgcctctcaagttcaagcgattctcttgcctcagcctccctagtagctgggattacaggcgcccgccaccacgcccagctaatttctttgtatttttagtagagacagggtttcaacatgttggccaggctggtctcaaactcctgacctcaggtgatccgtctgtcagcctcccaaagtgttgggattataggcatgagccactgcgcccggcctatttacaaaatttttttttttaaataatgttttaattttgtagagatggtgtctatgttgcccaggctggtcttgaactcctgggcccaagtgatcctctcttgcccttgcctcccaaagtgctaggattataggtgtgagccactgtgcctgcccaaccaatagaatattcttattatatatgatgcactctggtatttgccgttctgtgctattctgtttgaatttaaaaattggtcaagacccaccaaactgatttccccaccaaggcagtgacacacattagaatgacctggagaattttaaaagatactgatgcccaggcctcaccctagagattctgaagtggtttcaggactttttcttaattaaaagataaatagagatgaggtctcactatgttgcccaggctggtctcaaactcctggcctcaaacgatttctcccaccttggcctcccaaagtgctgggattaaagacgtgtgccaggctgggcatggtggctcacgcctgtgatcccagcactttggggggctgaggcaggcggatcacaaggtcaggagatgaagaccatcctggcttgatctgtagatcaagtgaaaccccgtctctactaaaaatacaaaaaaaaaaaaaaaaaaaaaattagccaggcgtggtggcaagtgcctgtagttccagctactcaggaggctgaggcaggagaatggcgtgaacgcaggaggcggagcttgcagtgagcctagatcgcgccactgcacttcagcccaggcaatagagcgaggctccatctccaaaaaaaaaaaaaaaaaaaaaagatgtgagccagccagttgcaggatttctggaagctcccaggtaatgctatatacaaccaaagtgagaaccactaacctaacgttgtctccccagcttggggaacagtgaaatgagacttagagccagggtgatccaggaacatagagggacacagaaagatacaaaggcaggttcattttatttatttatttatttatttatttatttatttatttaaattttttgagatggagtgtccctctgttgcccgggctggagtgcagtggtgtgatcttggctcactgcaacctccgcctcctgggttcaagtgattctcctgcctcagcctcccaagtagctgggactacaggcacctaccaccacgcctggctaatttttgtatttttagtagagacggggtttcaccattggccagggcggtctgaactcctgaccttgtgatctgcctgtctcggcctcccaaagtgctgggattacaggcgtgagccaccgtgcctggccgatttatttatttatttatttatttattttgagatggagtttcgctcttgttgcccaggttggagtgcaatagtgcaatgtcagctcaccgtaacttctgcctcctgggtttacaagattctcctgcctcagcctactgagtagctgggattacaggcatgtgccaccacacctggctaattttgtatttttagtggagatgaggtttctccatgttggtcaggctggtctggaactcccgacttcaggtgatctgcccgcctcggcctcccaaagtgctgggattacaggcatgagccaccgcgcccggcctatttatttttttgagacagtctcactctgttgcctaggctggagtgcagtggcacaatcttggctcactgcaatctccacctctcaggctcaagcgatgttcccacctcagccccccaggtagctgggactactggtgcatgccactacacctggctaatgtttgtatgtttttgtagagacggggtttcgtggtgttgcctaagctggtctcaaactcctgggctcaagcattcctcctgccttggcttcccacagtgctgggattacaggcgtgagccactgcgtccatccagattcatgatatttagatgttgaaatgtggctttacagactcagacagctctctgaggcaaacaaagagggagatgcaggtaccctcagcacaagccccaaattacctgcaggggagaggcggaaaatcagacaatgtagaaaccgggagaagaaaggtatggacagaccgatgcagataggaggggaaggaaatacctggaaatgagatagagaccggctggacagaccccggggaccctgcaggtcaccacacccttctctttcagctcacctgttctccaggaccagccctgctggggcccaggcccaggctctgagaggccgtgtcctaacctgccctggccccggagaagctacgttgccacctgtcccccttccctggcctggtggggcctggctttggggcaagactgagccacgggggaagggggaatcccgtacctgctgctgcttcctctgtcttggctaacgtctgtccccctgaacccctaaccataccccaagagctcccaaagcctgagaccagggtcatttgtccccaactccccatctggccctgctgttgctagtacctgttatttattacctggaggcctgtccagcacccaccctacccccataaagcattgtttacacctgtgtcttggcctccattattgtgagatggcagggagatggaagaggtccctgatggaagaatcatgtgtcatggtgtttgggggccttgtttctgtttttttgttgttgttgttgagatggagtttccttcttgttgcccaggctggagtgcagtggcgtgatcttggctcaccacaacctccacctcccgggttcaagctattctcctgcctcagcctcccgagtagctgggattacaggcatgtgccaccacacttggctaattttgtatttttagtagagatggagtttctccatgttggtcaaggttggtctcgaactcccaacctcaggtgattcgcccgcgctggcctcccaaagtgctggaattacaggtgtgagccactgggcctggccttgggggccttgtttcctgattggacgtggtgtggggtataccaagcatgatgactcaggtgcctgttgcggagggagggaatttgttactgtgtggacagtttgtgacaatctgtgttctaagctcacgtgtgtaaacacgctgatgtccctgtgtttgtgacatgtgtacatgtttccagtacctgcatatgggatgatgtctataggatataatgtgtgctggttgtgtgtgatgctgacagccgtaactgctctgtggccttggtcattgtattggtgaggctggtattgtttgggacatcaaggccaggggatgggaatttggacctataggtgggcctccggtgtgtgcatgtctgatgcctgagagtcagaggcagtgactcactactgcgtgtgtgcctgtgcatgtgtaccccgaggtctgtgtgtgttttggtgtgaatttggctccttttaaacacccatgtgtggccaggcgtggtggctcatgcctgtaatcccagcacttcgggaggccaaggcagatggatcacttgagcccaggagttggagactatagcctgggcaacacagagagaccctatctacaaaaataaaaaacagaaaaagttagccaggtgtcgtggtacacacctgaagtcccagctattccggaggctgaggtgtgaggatcactttagttgggaggttgggcctgcagtgaactatgatcatgccacagcacttcagcctgggcaaaagggtaagaccccatctcaaaaacaaaactaaactagaaacacccttgtgtggccatgaaccctgtgtgtgccctgaggactgcgggcttttgtgcaatcctcacgcatgtgtggataccagtatgcatgcccttgtgctcacgcgaaccgccctacgccctcaggtggcctgcaggggactggtgcagccccgaggacactcccagttgctcgtcgccctcccatctccacgtcggccttcaccgacccggcgggagccttgagtcccagctctccagagcaatggtggagcgggcagggcattcaaaatgaccttatctccttagtctcctaaagtgttcccagctggccatgcaaatgtcttctctgtgtagcgttccgtggatttttttttgtttcattttttaattttgtgtaaagataaggtctcactccgttgcccagactttccctggttctttattctgattcccacaatcgtcccgagggggcaggccggagcgggtcttgaaaatacacatttgcacatcccttctagtccgcgttcccttttctcaagggcaacccgcacttttttgcctccgttataaaagatacttatgtaaattactgacgtgcgaatttacatacatttctcaactaactgcgtagccatttctccgtctctcacctccgttcctggacggcgagaaggaggaggagctgaccatgtaaatgaagtcacgcgcaccgcgctgccgaactcggtgccccgcgctgggcggggggcgggtaggcctgtccatgtaaatcacatcatttgcgtgccccgccccgccgacgccacttgattccaacatgcaagaaacgccccctcccagacccggcccctcacactgcgttccccctcccgcgcaaagggggcggggcggaggatgcaaatgaacctcgtgtaggccacggaccgctgtttcctttctccttggtaggggggttgtcccgaacttcctcgccccgctccgccccgccccgcgcggctcgggcctgcgcaggcgccgtcccctccgcggggcgcggtcacgtgcccaccgggcgaggcggggcggggcgtcgcgcgcggtgggggcggggtatggcgcgctgtgcggcgcagggcggctggcacaaacggcggcgccggggccggaggaaaaagctcggtgaggaggtcgcggggcgagaagggagcgggaggagactaagccggagccggggcgccggcgcgaaccgggcggggtgtgggggcgcgcgccggggcctgccggggcgaccccgggaagggggatgtgggtgcggcgcgggggaggggacgcgcgccggttacgttgggtgccggccgttgtgggggttggggtgggggcggggagcgcgcgccgggcggaggccgagtggagggggaggggagggggtccgagcggcccttaggccctgcccctgtcgcctactgcgctcagaaggggcctcagggcctgccccgggttgggggcgttggggtgccctggatgggggcacctttatctctcgtcctgtctccgggtgcgtgcaccctcctccgtcctttcctctgtcgccgcggaccctctccccgagggcccctcccgtcggtcagtctcgggacctcccttccgtctgggcgtgtgtccgcccccggccggcttcctcccgtcgggctcgggtcgaccccaccgtcccgctccgccccgggtcctccctcccagcttccctccggtctatttttctgtctctgggcccctcgttctctttgtttttggactccccagtttcctctgtcttttgacccccccgcccccaccctgactctccctggaacccccacgtttctcgttgtctttctggaacgccgaggcaggtccctcctattttccaaaccccctcctttcccactcctccacaccacccttttctactccagccctccttcttctgtctttggttaccgcgtcccacaacctgcaccacagtcctctgtcttagggtcatctacccagcccctggcctccagcctctccctatcactgcctcttatctgtcagcggactcccgcacctccagattctcagggtcctctccccgacttggcctcaggttttggggggcctctatagtcaagtctgtcctggtcgtcttccccactcctgcccataccatcccggctttcccctgcctgcctgtctctagtttctctcacatccctttttttttttcctttctctagccaccctgaagggtcccttcccaagcccttagggaccgcagaggacttggggaccagcaagcaacccccagggcacgagaagagctcttgctgtctgccctgcctcaccctgccccacgccaggcccggtggcccccagctgcatcaagtggaggcggaggaggaggcggaggagggtggcaccatgggcccgggcggtgccctccatgcccgggggatgaagacactgctgccatggacagcccgtgccagccgcagcccctaagtcaggctctccctcagttaccagggtcttcgtcagagcccttggagcctgagcctggccgggccaggatgggagtggagagttacctgccctgtcccctgctcccctcctaccactgtccaggagtgcctagtgaggcctcggcagggagtgggacccccagagccacagccacctctaccactgccagccctcttcgggacggttttggcgggcaggatggtggtgagctgcggccgctgcagagtgaaggcgctgcagcgctggtcaccaaggggtgccagcgattggcagcccagggcgcacggcctgaggcccccaaacggaaatgggccgaggatggtggggatgccccttcacccagcaaacggccctgggccaggcaagagaaccaggaggcagagcgggagggtggcatgagctgcagctgcagcagtggcagtggtgaggccagtgctgggctgatggaggaggcgctgccctctgcgcccgagcgcctggccctggactatatcgtgccctgcatgcggtactacggcatctgcgtcaaggacagcttcctgggggcagcactgggcggtcgcgtgctggccgaggtggaggccctcaaacggggtgggcgcctgcgagacgggcagctagtgagccagagggcgatcccgccgcgcagcatccgtggggaccagattgcctgggtggaaggccatgaaccaggctgtcgaagcattggtgccctcatggcccatgtggacgccgtcatccgccactgcgcagggcggctgggcagctatgtcatcaacgggcgcaccaaggtaaggctaggtgggggcctctttggaggggctttgcagcaccctggtttgcagcattcagtgctctgagcacagtgggtttggagacaggcttctgggaggtcacagaaggtttaggcagttcagtggagtgggtatgcttacttgtggggacttgggggggtctttatcctccctacgggccttaatgtgtgcacctgataagctaggagtttgtcctggagccacagtggttcttttttttttttttttttttttcttttctttttttattgatcattcttgggtgtttctcgcagagggggatttggcagggtcacaggacaatagtggagggaaggtcagcagataaacaagtgaacagaggtctctggttttcctaggcagaggaccctgcggccttctgcgtgtttgtgtccctgggtacttgagattagggagtggtgatgactcttaacgagcatgctgccttcaagcatcgccacagtggttcttgactttgccaggaaccctcttaaactcatgagagctgctgacattcacagcgtggaccttggtggggttcatggcctcctggtgtcagtctgtggccccagaccaagcacggggatgtagataggcacacagttcacctggccgttctctgttgctgtctgtccctgtccacatccttccctgtgctcctgtcgtccatccctgtttgctggcccatgtttctagtccatccatcctgtctccaaggcaggagaagcagaagggggagggtggctgtgatgagtgagccctgggctgagggaaggaaaggggtgctgcccgctgggccgagtgcttggccctggactgcattgtgccctgggtccccactgtggcatctgcatcgaggacagtctcctgggggtggtactgggtggctgcctgttggcccaggtggagctcatccccatgtctcccacccttcactgtcccagtccctgccctccattccccctgtcctgtgtgtcacttcctccctacccatgtctgtctcttcctctgcctttatgtgtttgttcttagtccctttttctttttgctttagaacaatagttcttaatggtattttggagcctgggtctttttgagaatctgtcagaggccacagatcctctcttaagacaaatgctcatttgcttggagtttccgggcagttgtcaaggcctcatggcctccagctgcctgttcaggaacctggggtcaggagcccagcacaggacagtggtccatagggcctttccgggctgctgacaggatcattgtcttcatgggtggtgtgggggcctggccttgagtccaaggcttggtgtcctttggacaaggccctgtggggagtgcccactgctcaacacagtgatgcctggctggctgatggcacgggcagtgttgtgccctgcaggcgtgaggctgagctcctgatgtcctctgcctcctcctgcagatcccatcttgggttctgcttctgtgtggctttcctctcaggctggagctggctcagggaccagggctcccccggggccaaggcctgtttcctccccaccccagctggaacttgttctacttccctctccctcccgttacttgatagctgagccagagccggcccctccctgggcttggctcctgtgcgggcgggatcagtggcctccctggctcagcatcttcaccccaggttggctgtcgtcctcgtcagggggagaccagaagggctgagtggcccagatgggacactgctctgagcctcaatttgctgatccacggaatacgaaaaccaggttacatccccagtgagtctggcagtttggggaggggagagtaggagaagatctcttgtgttttggtgcctctggtgcccactttctatgtggttggggacagggccccagcgaggattggggaaggggcgtgtttggacttttttagccctaggtgaccttgattgtcctagggaagtaaggacaggccaggctggactgagaacataggggaggagccctcccctccccagtgagacagcaactccaggctttcccgcttttagatgggccccatctggactctctcctgtactccagagtaaggctgtggggtgctcaggtgggctgcagcagttgccgtggggacatggatcaccagtgtggctagagccagtagaaacgtgcttcttagtcgttctgagtggagctcctgtgtcatccttccttcccccaactccctggttggggacaggtgctccgttgacctgtaggtgggagagagttgactcccactggcagcaagggctaccagaggggaccccagggagagtccagcttgcttggtttgctccttgaagagcagcttggaggtgggacagtcacaggcttctgactggggtgtgtgtgtagtgggggtggggctcttggcaggcagattgtcaccaatagcctttaagtctttggtctcctggccctggtcccacctgtccctcccctaggtgggaggggtggagagcaagtttcctgaggccttcccctgtgagggcaggaagtagatactttccttggggccagaggatgctttcacccccaaggtgtgtatatgtgggggaagggtggggccctaaagagcaggttcctgtttctgtgtgagtcccatgtgcttggtgggaggcgctgtgtgagaatgtacagggcaggaggaaacatagcagggctggggtgcagaggaggcccagagcagtgcactccagtctgcaggtactgcactgggcactggggagaccaacctggccccaggggcttccctgtggctgccttccagggcagtactaggtaaacaggtgcctgtgctgatgccatgttgctaggagtggaacggacaatcagccggagtactcaaggtgacccttggtctctgaatcctgaataacaaagagggtcagaaggaagagtgtcccaggccagtgctgaggccttgtggtggcgatgagctcagcctgttgaggcatggagcagagtgatgggagaggcacatgaggttgggggcctttgaggctgtggttgggaatttgtattttctcaggatggagtgaagacctggagaggaggggctctggctgctgtgtggggatgaattgtgggaagagggtgcagcactggaccccttccctgccacccatccacgtgcatcatcagtgtaatctctgattggattcctaattggggaggtcttgcccatctctagtcagtaactcactgtttctaagcctcctggaccatggcccaattcttctcccagtgaggtggttgctcagagtgccgacccttccatagggagtgagcagtgcaaagaaggtgccccctcctgaaccttgaagtgtagccattagggttttccctggggggccttctcactaattgtactctggtgctgccagagagaaggttgtcagcttcccactgctaggtggcagtagatggtggcagccctctctttccagggcaaggtctggtggatgaggtgcacatggttaatgcagagcagcttaacatccaccacagagggtgagccctgggataatgtgttgggaggcgtcctggggagggtgaggattgaagcagcccagtctgctgtggcgtgcgtgcttggcaagcatcctgttgtggcagtggccactgatgtttgatcgtgaatgtttatcttgggactgtcttgctgggccgggcccataggtgtagctgagcattcgtggggaatggacgccagcagagttgtaccagggcagagaggtcagggcagagaggtcaagacagatggtccgggctggggagaagttgaagggtccttgtgccagtcctcccctttttgtgtgctacctcatcttgccactgcagtgactttgggcagagggtgggacagggaccttttaaaatttttaaatggcatttcagcctgtgctccagttctccatgtggcaggcactgtgctggctgtcttcccagacacttgttatcttgttcacttgttccacaacaacctgtgaaatagctgtgagctccattggatccatggatgaggaacctgagaccaggaagtcacctgcctgatgccacagctcatgtggcagcactgagacttgaaccagggaattgtgtctgcagaagtggctgggccatttcctttacctctcagccacctttctgccagctccctgatgacaaacatcccggggccctggccacagcattgtagggctgggtcaggggagtggcaactgtcaggcagaggaaagaaccctgtagacagagaaaccaagccctgcaatgagtcctgttagatctccaggagttggggctccagaacctcccaagttatgttctcagagagattaattgctaccgctgtaaacagcagtgtttattacccctgctgtacacatcaggcagttgaggcccattcaggtgttggaactggctagggttacccagcaaattatccttggagttggaattaggtctttctattcagactgtagcttttggctcctgttcggaggtctatgggacagataatttagtggggattctttgtagtccagggcagcagttcttaacattgctgcatggtagaattacctgggaagctttaccaatttcaggcccttccttaggccaggtacttcagaacctcagagctccccagggggctccactccacagccaagggtaagaattcctggtctagggctgtgaggccacctccttgcacacctgaaaatgtttaaattggtattattctactgaaatggctgaggtggggtttggggtatcttgaaacaaatcaaactctgttactaattgagccctagctgggtgccaggccccaggtatgtgtgttgggagggagtgggctcttgaggcccaggagctgaggtttctgatagacttggggatgggattttggctgaaaaagaaagtcttttggggcaggagcttggaacccttgacccaaggagtcatggggaagatggggcaaggaggggtgggaaaataggtaattcatggctgcttctctaagatgtgcctgcctagccccagtaaacctacctccctccatccctgccaggccatggtggcgtgttacccaggcaacgggctcgggtacgtaaggcacgttgacaatccccacggcgatgggcgctgcatcacctgtatctattacctgaatcagaactgggacgttaaggtaggggtgagggtgagggtgagggtggcgctggggctagggctggggcgggggtggcgtgcgtccactccattttccactctcagcccagattctggcattctcctgtttctcttctcaacacacagcgggcagtgcgatctgccggctcttcctgggaaatggcacctcctcctctctagcggactgtgtggtgggaactcccctctttccgggaatggtgctgtctgcccagccccacccggccttgtaatgaacactttcccccttttcctgtctttagtagcttcctgcccatctccatggtgatgcagtctctgggttgtcattcactttgagagcccgaggggtgggagggagtgatgcaggcagacgctgcgcctcctagtgggctcccggggcaccgtgggaggcagcggctcctggccgtaccagctagcctcatcctttggcctgcccccaggtgcatggcggcctgctgcagatcttccctgagggccggcccgtggtagccaacatcgagccactctttgaccggttgctcattttctggtctgaccggcggaacccccacgaggtgaagccagcctatgccaccaggtatgacctgtacttctggagacgcacccaggtgctccccctgtgacaatgtcctgtcagagcctcagagtgactagggagcgacgaagtattgagagggggcctaggtgggagcagaaccgggtggctcaaaaggatggccgcctagtgtgtgtggatatggtagctggaattgcagaaaactaatgtccaaccaccctggtctccaggtacgccatcactgtctggtattttgatgccaaggagcgggcagcagccaaagacaagtatcagctaggtacctgcttccctcccttcagtccttcctattctgtgggccctcttgggcctgatgccaccccatccccctcatcagcctcttgttaaatcccaccactcatttttcttcatctctgcccaccttccttagcccactctcctggtaccccaacaggagccccatttcttcctggtcctctccccatctccccaggtttcccttggcttctttgtccttctgatgactcactgtctcctgtcccctctcacccccagcatcaggacagaaaggtgtccaagtacctgtatcacagccgcctacgcccacctagtggccagtcccagagccgcatggcagacagcttaaatgacttcaggagagccctgggcctgtgctggctgctccttccctgccaccgctgctgcttctgactttgcctctgtcctgcctggtgtggagggctctgtctgttgctgaggaccaaggaggagaagagacctttgctgccccatcatgggggctggggttgtcacctggacagggggcagccgtggaggccaccgttaccaactgaagctgggggcctgggtcctaccctgtctggtcatgaccccattaggtatggagagctgggaggaggcattgtcacttcccaccaggatgcaggacttggggttgaggtgagtcatggcctcttgctggcaatggggtgggaggagtacccccaagtcctctcactcctccagcctggaatgtgaagtgactccccaacccctttggccatggcaggcaccttttggactgggctgccactgcttgggcagagtaaaaggtgccaggaggagcatgggtgtggaagtcctgtcagccaagaaataaaagtttacctcagagctgcacacatctgactccatctgcaatttagggcctttattgaccgaggagggtatggaggtttgagggccagtgagcccaccatagtggagcctgacctcagcaggccactggctggagctggaagtctggggggacactgcccaggccagtgcactgcaggtgaggttgatggtgccagggcgtaccacagggagcaggcagaacctctgtaaggtggccgtaaggaataggaagatacccgagtgggccaggcctgtgcccaggcacatctgctttgccgggtacacaggtgcacagtgagcaccaggtaccccagagccagtccaggctggtccccttcctcctctgcctgcacctgaggcaaagggcatgaaagcatcattgccctggaacttgcccttgtccaggaagttggtagggttgaagcagtctgggtctttgaattgagtggggtcccggtgtgcagtcacaagcaggggaatcacaaaagtgccctggggatacatgcaacttgggttacctgcgggcttggtgagcacctgcaccacctccatccaagacgctttttaaaagcccaagggaataggccgggcaagtagctcacgcctgtaatcccagcactctgggaggctgaggacagatcacttgaggtcagaagttcgagaccagcctggccaacatggcgaaacctgtctctactaaaaatacaaaaattagccaggcgtggtggtgggtgcctgtaataccaggtactcaggaggctgaggcaggacaatcgcttgaacccaggaagtggaggttgcagtgagccaagatcatgccactgcattctagcctgaatgacagagccagactccgtctcaaacaacaacaacaaaaagcctaagggaaggcagagctgccttcctgctccaggggtaactgattgtgttttggtctgcacagcgcacacctgctgattctggctgatctcatgcacccgggtcccgcacgggatccccagactcagtgggtacctttgggcagacagtggctgtgcaggtgggtgtcgagggtgagggtgcgcggcagccccaggggcaccacgctgatgaagcactggatctcgagcagcactgcgttggcgtagggcaggcacacgcgatagtccaggcttggggcgggcctccaccctaccacagggtccagctcctgcaccttggctcaggccgggggaggctgtgagctgcgcacttccaggaccctccagccatccccagactgcagcctcccattctgggtctctccgggttgcacacctgccacctctaggtacttaagcagaatgaggagcccatagcacagggtggtgctcgtggtttcggtgacgccaaaaaaaaaatgcgtcgtcattaccgacgtctactcctggaaatggctctccgggtcctgctgttactgtgggcagaggagatgtgctgccgcgtgccaggcacctgttggtgggcggcatggatagagtttagagagctgggacccatgccttacccatctggtcaagcaatcaatgaaatcgcggggctccgctggctgccgcatctgccagtgtcgttgaatttgctcagagatgacccgcagctccgaaaagtttcggaagattcggtggtgcgggcccgggagccagtccatgagggacaggcaaatgtacatctggagagacagggtctgtctcaacatgggccctgcacaaggccactaggccttagtttccctacagggagattggactaggactttgatactggatgttctagaactcttccaggaatctgtcccattctaatgatccattgtaggtaggtctgtgtactcgggatttggcataaggctggacgcaccaaggaaagattgtggccggccctctcacctcgccccatctggaactaatgatgcagaagttgtcactgaagaggttcaggagcctcaggaactccgggtccccatagcgatagcggttcccgaagacaagaacagataacattggatacagcattatccagtagccgcacggggtcaaacggggctcctgggggtaggaacaggacggtggtcataacgcgtggtcctgcccccagccagccccatgggcttactggctttcttccacccaaataccttccagtggccccgtcttggcagtgcaagggactctcccacaccaggcccttccgctctcccggccaggccgaagcaatggtggcttgaaattcgtctagcagacaagccgcctcctccaggacgcgcgcctcgacggtccgcgtacccaacccgaacttcttaagcgctccaagtgcaaaattgcgcagtgtccaccagcacggccggttagaaaacaagattcctgtggtggggacgggaaaggaggcgggccggggagccggccacgccctatccaggaagcgccgggtcactggctacatccctttaggggcctccgactcctgcggccggcttcgttccctttgcttctttaccagacctccaagtgccctatccacacattggccccgcctttgctgggctccatccctgacctaggctggctctcgggctttgactcttaggctcttttctcctgttggctgcaggatgaacctccattctaaccttacgctttagcgccgccccgccctctctcggccgtttgcacctcattagctggagtctctattaggccccgcccccatttgcccgcctctaccatttacccgcccagcctggagcgtccgggccggcaagtccagcgccggggcctcactgtttccgcgtgtgaagcgttcgaagactgccatggacccgcggccagagaccgcatccgcctgtagcactaacgcgtcccgcagcgctgcgtagccgcacagccccaccgcagggcgcgggcccagccgcactgtgaacacccggccccagcggccggagagctacgggtagccggtgctcagcgggtgcccatagggttcctcatcggagccattgcccccagctccctcttccttcagacccaggagtcctcgtctcagaccctcattcctcaggcccaggaattcaaatccccagctccttcctccctgagatccaggagtccaggcccccacttccttcttcccttaggacctggaagtccagcttcccagcctcctgcaccctcagagtcgtctcctgggccctcagtactcagcctgcccaccctgaaccagaacagaccccctgctcccctcttcccacaacctgatttcctgctctgggctccttcgttacgacccagtgtcccggccccaggctctccactccctattctcctttcctagtactcagcagtccggagcactcatccttcctgtccttcctcaggatcatagagtacaaaccctcagctgtcttcattcaggaggagttctagtccccagccccaccttcacgaatccagaattccgttcccccattcctgtcgggaatggagtgcgcggtccaggcctccggactgcagctgcaagttccccagcaatgggagcggcctgggccggggaggtagggacccccgcatctgagcgcggcacccaccctacccccaccacgccggcgccagcaccagaagccacaacagcagcgcagcgatacccgcgacatgcctgcaattctccacgcctgcaccccttcacctctatttgatttccaaggggtcttaggggtggagcggggcggagacccgatgtgggaggagtgggcgtctccgggctgctcattccgtggattccccaacccgacgtctccaccccgcccccagccctagtggagctgtgccctggctccccctggctttttttgtgtgtctgcctcagcctgtcttacttagcaactttcgtgcaccagcattttcatggcaacacacctggacaacaggtgcaccctcctgagcccctagcacctttgagtccaatttacttggcctgtaagtgtgtattcctcaatctccgggccacctctgggtcccctgaacgctgtaccctgtacctctgattcctaaatacacaccgactctcaaatacaccacttctgttttttttttttcccttcttagagtttcactcttgttgcccaggctggagtgcagcagtgggatctcggctcactgcaacctccacctcccaggttcaagattctcctgtttcagcctcctgagtagctgggattacaggcatgcaccactaggcctggctaatttttgtatttttagtagagacggagtttcaccgtgttggccaggcagatctcaagctactgacctcaggtgatccgcctgcctcggcctcccgaggtgttgagactacaggccactgcgcctggctcaaatacacttctaaagacacccctggcattcctgtgctctgtgcctgtgattcctaggagctcacacctgagcccttgtcacttccattactcttaggaccctgtgtactatgcttgttccccagatctgccttcaatttccctggcttctgggtgtccatcagtctggcacttctgtgcctctccttagttcttcagggtgcctttctgcatgttgatccccttgtacctccatattatgtcctgccctgaatctaccatctctatccccaaggcactggctcccagatgcccccaaatgttctgtgcccatgctgctgaaccccctggtatccagtcccccaagtccctgtctgaggccaggccatgacgacagacaaacttatccctcattctctcatctatcccccccaacccccatcctagggcatgggctagagggggcagactctggcctggatgggccagggctgcggtggtgggagcagtgaggttggggctgtatttggaacagactgttcaggaatgtggtccaccctcctgcctgtccctgcttggccaaatccagccttcctccaagtgcctggcacagggcccagacctggggagatggtgggcggggggtggactgtgcagagcctaggactggcattgtctctgggagggtctctgtgtatctttgtttcatctctcagtcttgcttgctccctccctccctccctctgtccgtccctccctccctccctccctccctccctccctccctccctcccttccttttttcttttttttttttgagacagagcctggcttctgtcccccaggctggagtgcagtggtacgatcatggctcactgcagcctcaacctcctgggatcaaacaagcctcccaccttggcctcccaagtagctgggaccataggtacacaccaccacgtccggccaatttttgtattttttaaggagacaggatgtcactgtgttgcccaggctggtctccaactcctgggctcaagcaatctttctgccttggtctcccaaactgctgggagtatagttgtgaaccagcgcgcccagcctccctcactctcagtctctgtgtttctgtgttcatctctctctctcctctttctgtctcttcccatctctctctcttttctctcagtctctgcctctgtttgtgtctgttttctgtctctcttttcagtatgtctgtgtcttcccctccctgtatctcccctagtctgtgcttccctttgtctcagcctggcacttctgtgcctctccttatttcttcagcgtgcctttccgcatgtttacccccttgtacctccatattctgtcctcccctatcctgggtcttcctacctgtcagcctttctggaacctggtgactgacaggggttgtggggcaggacccctgctcagagctgctgactccactgacagcgggagtgtggtggggcacagtaagctgcatcctcccccagccctaccccaccctctgtgacaggctttaatggatcctgtttattatggcttctggtttctccccagctcctgactcttcctccgttttgctcgggtgggctgtcctctggaatgtcagctcttctagagcagggattttgtcttgttcgcttctgtatcccagcacttaaagtagtgcccagcacagcagtaggcacttagtaaatgtttgttgaatgaatgcccaatttttcttcctcgctacttctctttgtttttttttttttttttatagagacagggtcttgttaggttggccaggttggtcttcaactcttggtctcaagcagtcctcctgcctcagcctcctaaagtgctaggatcacaggcataagccaccatgcccagcctctttcttccctcccctcccctcttttccctttcttcttctcttcccttcccttctgtctgtcttgttctgtcgcccaggctggagtgcagtggcaccatcacagctcactgcagccatgactgcctgggctcaagtgatcctcccacctgagcctcccaagtagctgggactagaggtgcgtgccaccatgcctagctaattttaaaaatatttatagagaccaggtctcactatgttgcccaggctggtctcgaactcctgggctcaagtgatcctcccgccttggtgtttctatctctttgtaattagactggatttctctgtttctctctttcttttcctccctttttctttttctctcaggtctctctatctctcttcatttctgttctctttatttatctttgctttagggtctctttgtctttcctctctctggacatcactgtctttcccttttctcagtggctctctttctcctcccggtctctgttttccaggatctctttgccatccctgcgtatctgtctcttccttttcctctccatctcttctcagtgtcttcacgtgtttttctccatcatctctctctgcctgtctttctcaggacctctgagtctctctgtctctccctctcttctccctctctcccccgacctctgtgtccctggctgggtcctggggcagactctggtcagcctgtgatgggaacagtgtggggattaaagagctgacatcttaatccccatgtgggcactgcctataagcctcactccagtcagccccatgctcagcagagcatgtcccagtttctgcatcactttggggagaccccgttcagggtagagcctcccaggccacctccactgatggctgaggggccagttccactctgcctgaatctggctcgatgtgctttgggacgcctgcccagcgagaacagccactgtcagcaggatgttagggtattaggtcgggtcccaggttgggagggtacatgcctggggttgccatcctcatcccaaaggggagaatttcagagaatttcagtgagagggtgggagggccgagtgcagtggttcatgcctgtaatcccagcactttgggaggctgaggtgggcagatcacttgaggccagtagttcaagacaagcctggccaacatggtgaaaccccatctctactaaaaatacaaaaattagccgggcatggtggtgcatgcctgtaatcccagctactctagggaggctgaggcacgagaatcacttgagcgctgaaggtggaggttgcagtgagctgagatcatgccactgcactccagcctgggcaacagagtgagactctgtccccccaaccctccaaaaaaaaaaagaaaaaaaaagaaagaaaaagaaaagaggggctcgggattgagggagagagcctcagtcctcagaactcccattgtcattgctcatctgtctttctctggtcatttctctgtttctttccattttctctctcaattcccctgcctcccatttcttagtgtcggtatttctctgcttttctctgtatttaagggtgtctgcctctttcttggtctctgacttgtgaattaaaaggtagtagttagaagtgcagtgtctgagtagggcatggtagtgtgcacaggttgtccagaactttgggaggctgaggctggaggatcacttgaggtcaggagttcgagaccagcctgggcaatatagtgagactgcctctacaaaaaataaaaataaaaaaattagtggctgagtgcagtggcttatgcctgtaatcccagcactttgggaagctgaggtaggcagatcacctgaggccaagagttcaagaccagcctggccaacatggtgaaaccctgtctctactaaaaaaaaaaaaaaaaaaaaaattagctgggtgtggtagcgggcgcctgtaatcccagctgctcgggaggctgaggcacgaaaattgcttgaacccaggaggtggaggttgcagtgagctgagatcgagccactgcactccagcctgggtgacagagcaagactctgtctcaaaaaataaaaataaaagtaaattagccaggtgtggttgtggtgcaccctgtagtcccagctactcaggaggctaaggtgggaggatcgcttgagcctgggaggctgaaactgcagtgagatgtgattatgccattgcatcccagcctgagagacagagtgagagcttgtctctaaaaaaaggaaaaaaaaaaaagaagaggaagaagaagaaaaagaagtgcagtgtctgtagcctcagagtctgaatttagataccagctctgcctgtttctgtgtgatcttgggcaactcacttcacctctctgagcctcagtttgctcatctgtaaaaatgtggtaatactgctttgtggccaggtgtggtggctcatgcctgtaatcccagtgctttggggggatgaggtgggaggatcgctttaggtcaggagttcaagaccagcctaggcaacattgcaagaccctgtctctactaaagattaaaaaaaaaaaagttagccaggcacggtgactgtagtcccagctatttggtgatctgaagcagaagcaggaggatcagttgaacccagaagttcaaggttgcagtgagccttgaattgtgccattgcactccagcctgggcaacaagagggagaccctggctataaaagaaataaacagggtaggtgcggttgccggtggctcacgcctctaattccagcactttgggaggctgaggtgggcggatcacaaggtcaggagattgagaccatcctggctaacagggtgaaactcttgtttctactaaaaatacaaaaaattagccgggcgtggtggcgcacgcctgtagtcccagctactcaggaggctgaggcaggagaatcacgtgaaccagggaggcggaggttgcagtgagccaagatcgcaccactgcactccagcctgggtgacagagcgagactctgtctcaaaaaaaaaaaaaaaaaggaaagaaaaaagaaacaaaagcccccaaaacaaaccagagcaaagtagggagacttaaatgaggcattcagaacagtgtgcaaatagggagtgtcatttagtgtcagtgcttgttccatcttagcctcactttgccctgctttccccatctctctgcagtgccctgcatctcttgcatattctctctgatatctctctgctgtcatcttcttcttgatatctctctgctgtcttcttctttttctttcttactttttttttttttggggggggtctcactcctgtctcccaggcgggaatgcagtggcacaatgatagtccattgcagcctcgacctcccagactcaagaaatcctcctgccccactttttgacttttttgtagagtcaggcctcactctgttgtccaggctggtctcaaactcctgggttcaagcgatcctcccgcctcggcctcccaaagtgctgggattacaggtgtgagccacttcgcctggtcctgctatctttttctctgtcttggtttctctgcctcactggcttcaggtcctcgcagcctttaccttcaagcctgtctccaggatacaatttgtcccaccctagccaccctaaaggtgagggcaaaactagccagtgtctccatctctgcagccagctcccttctccccatcctaaatgactctcattctcactttaattcagccaagactggtttgaatctattacaatgtactaagaaatgatacaaaaagcccagaaaagggcgtgccatagaacaagctctgtgggtacaaaaagacatgccacatctgcctctgccctgcagacggggtacagattggagggatgggggaagggcacgcggcaggcacagcatgcagggaagacagcgtgactgccagagggatggaggcagaccgtggaccaagaaggggacgtagcaacccacatgggtgggcctcatcgctcacaggcgaatctggaagggccggggcgttagcgcgggtgcaggcacagctggaaaggccgcggcaaattgccaagacctgagctgagcggggtcaggtcgatgtcctcgggcgcacccagcggctgcagcgaaaagctctgcaggatggcggtgaggtacagaaagagctccatgcgcgccagcgactctcccaggcacagacggtgccctgcaggggtggcaggatggggagcggtggtgagataagatgaggttagaggctgcaaccccacattcccagaggaaaacataagaggaaaggaagacagcagctggggacgtcacagattcacccatgtaaagatgtgggaaagatgctttaaactgtggagcggaatgacctgggctgcttgggttcgaatcccggtgctgtcactactagttttgtgatcctggacaaaccacactttctgggtatttaaaatggggatatgaagactgggcgcgctggcttaggcctgtaatcccagcactttcggaggccgaggcaagaggatctcttgagcccaggagtttgagagcagcctgggcaacacagcaagatcccatctctataaaaaatttaaaaaaaaatgtgcaaggtggcacatgcctgcagtcccagctgcttgggaggctgaggcgaggggatcacttgagcccaggagatcaaggctgcagtgagccatgatcgtgccactgccctccagcctgggtgagagcaagaccctgtctcagaaagaaaaataaaaggagggatagtaatagtgcctcatgaggctgctgtgaatggtaaacacagggaaagcagtgaggctgtaagtagctcaccatgggccatgccctactctaagcattacatcacaattaattctaacaactccaagaggcaggccttagtattatctccattttatagatgtggacattgaggtacagagaagtgaagtaacatacccaaggcaacacagctagggggtgacagatgggatgcaaaccctgctggaatctgggctgcacattcccagcggaaaacataagctcttagctgggctcttgtagaggcagcacttgacgcacagtaggcaatatggtaagttacctattattatgccagttgttttttcttttcctgctactgagtaaagagggaagtatttttcagcagggtaaagaggaaagccaaaaaacaaaacaaaacaaaaaccctagaaccacctcaactgcgccacccagtggagaggtagacaatgaccactcccaagttcaattattattttttcttttaaacattttatatattttttatttttggctagtcagtattttttattttagagaaaggatctcgctctgtcgcccagactggggtgcagtggcatgatcatactcactgtaacctcaaactcctgagctcaagtgatcatcccacctcagcctcccaagtagctgggaccgcagatgcacaccacaccacatctaggtaatttaaaaattttcagtagagaaagggtcttgccatgttgtccaggctggtcttgaactcctggcctcaagcgatcctcccacctcagcctcccaaagtgctgggattacaggcatgagccgatgaacctggcccaagttaaataataattattataattattatttatttatttttttgagacggagttttgctcttgttgcccaggctggagtgcaatggcgcgatctcggcccactgcaagctccatctcctggattcaagtgattctcctgcctcagcctccagaggagctgggattacaggcatgtgccaccatttcctgcctaattttttttcttttttttttttttttgagatggagtctcactctgtcgcccaggctggagtgcagtggtgcggtctctgctcactgcaaggcccgcctcccaggttcacgccattctcctgcctcagcctcccgagtagctgggactacaggagcccaccaccatccccggctaatttttttgtatttttagtagagatggtgtttcatcgtgttagctaggatggtctcgatctcctgaccttctgatctgcccgccttggcctcccaaagtgctggtattacaggcgtgcattcctggctagttttgtatttttagtagagacagggtttcaccatgttggtcaggctaatcttggactcctgacctcaggtgacctgcccgcctagatctcccaaagtgctgggattacaggtgtgagtaactgcccctggctgttaaattattatcattattttttttgagacagagtctcgctttgttgccgaggctggagtacaatggtgcaatctcggctcgccgcaacctccggctcccgggttcaagtgattttcctgtttctcctcaggagtagctgggactatgggcgcccaccaccacacccggctaatttttgtattttaagcagagacagggtttcaccatattggtcaggctggtctcgaactcctgacctcaggcgatccacccacctcagcctcccaaagtgctgggattacaggtgtgagtcaccatgcccagtcccaagttaaattattaatcaacctccccaccttgcttcacgaggattttagtcactacttgcctataggagcagagttgagaggaggaatgaatgtctctgtgcatccaaagctgagaatgggtggaaggaaggagtgagcggatttggcaagtggaattaggatgaggaatgtaggtagaaattgggccagaaagactctgattcctgccctcaccagctgagaagggcatgaaggctggactcttcttgaaggactgattggcatccaaaaaatgctcggggttgaactcctggggcgtcaggaactggctggggtcgtagtggacggtgttaaggagggtgatgacatcggtgccctgtgtgggtgaggaggtggacttagcagtgtaggagggctgggaggctcccaaactcctttccattgtattgggctgggtgtcctggggacttgataaggggtgggtataggtgggtataggactcaatcgggggccaaggaaatatgtgtgggtgtctagggttccaagtgatgggtgctatatgctgtattattggggactttggcagggatgtgggaaacccccaccctttgtgggagcagatgtggggtttctggggaaaaggaggggtccctgagaatagcgtttaggcccagggatcctccagatgaagttccacaccccagggcttccagggaggggttctaggaaggggatttgtcacggtgaaggggtctagtccagtatgatatgagatggggtcctggcaaaggcctgagcttctggatttaagggtctgagatgtctgtagctagggcttgggatgccagttgctaaggcctggggtgttgattgctagtgcctgggatactgcttgcgagctgcaagagcctgggatgcctcctcttaggttgcctgatgtcgtttgccaggcctagcgcaccttgggtatcaggaagccgtgaaaggccgtgtccctagtgatgcggtgcggcaagttcatggggatgatgtctgcaaagcgctgcacctcgtggatcaccatgtctgtgtaaggcatggccgcgcggtccttcagcgctggcagccgcacgtgtcccaccacaaggttgatctcctcctgcacgtgggctggaggggaagggggaagtggggtggagggtatcaaaccaggctgggaagaggtgtgtccgtatgtggggaggggtctagtcaaagcctcccagcgctgggcgccactgctggggcgtatgtgagaattagctagagctggccgggcgcggtggctcatgcctataatcccagcacttgggaggctgaggtggatggatcacttgagcccgggagtttgagactgtagggaaaagaaagagagatcagactgttactgtgtctatgtagaaaaggaagacatacgaaactccattttgatctgtactaagaaaattactttgccttgagatgctgttaatctgtaactttagccccaaccctgtgctcagaaacacgtgctgtatggaatcaaggtttaagggatctagggctgtgcaggttgtgccttgttaacaatatgtttacaggcagtatgcttggtaaatgtcatcgccattctccattcttgggcacagtgtactgcggaaagctgcagggacctctgcccaagaaagcctgggtattgtccaaggtttcctccaactgagacagcctgagatatggccttgtgggaagggaaagacctgaccatcccccagcctgacaccagtaaatggcctgtgctgaggaggattagtaaaagaggaaggcctcttgcggttgagataagaggaaggcctccatcccttgcatgtccctggtaatggaatgtctcagtgtaaaacccgatcatacattccttctgttctgagataggagaaaaccaccctgtggctggaggtgagctatgctggtggcaatgctgctctgttactctttgctacactgagatatttgggtggagagaagcataaatctggcctacctacacatctgggcacagtaccttcccttggacttatttgtaacctggattcctttgctcacatgttttcctgctgaccttctccccactatcaccctgttctcctgccgcattcccctagccgagatagtgaaaatagtaatcaataaatactgagggaactcagagactggggctagtgcagttcctccgtatgctgagcactggtcccctgggcccgctgttctttctctatactttgtctctgtgccttatttcttttctcagtctcttgtcccacctgatgagaaatacccacaggtgtgaaggggctggcccccttcagagaccagcctgggcaacatggtgaaactccatctctaaaacaaaatagaaaaattagctgggcatggtggcgcacacctatggtcccagctactcaggaggctgaggcaggagaattgcttgaacctgggaggcggtggttgcagtgagccgggattgggccactgcactccagcctgggtgacagagcgagactccatctcaaaaaaaaaaaaaaggaaaaaaaaaaaagagttagccagggcctgggaggaagtgggtcagtgagggcgaaaggttggcttgtgcaagggcctgggcgttgggttgtgtgggtggggcttcagggagggaggcctggaatccaggacctgatgggatttcaggagcagtttcgggaccctacttgctggacggtggatcgagtgggtggactgtgtgggagggctggagatcagaggcagagcaggggttatacccagaggtggagcttggggaggtggagtagcagacagagctccgtgtgtgggccaggctgtgtgggaaaggtagggttccctggcaagtgggtggctggggctctggggcagagttctgggaggactgttagctgggctctgaagccagcatgcagtggtggacacggtgggcacaaagcaagactaagcaggtggaggcgggagcggtggctcacacctgtaaccccagcactttgggaggccgaggtgagaggattgcttgagcccaggagttggagaccagccagggcaacacagcaaggctctgtctgtacaaaaaataaaaaattagctgagtgtattgagtgtggtggtgcacgtctgtactctcagctattgataaggcggaggtgggaagatcgcttgagcccgaggtcggggctgcagtgagctgtgattgtgccactgtacgcctgggcgacagagtgactctgtctcaaaaacaaacaaaaaactaagcagagctgggtgcagtggctcacgcctgtaatcccagcactttgggaggccgaggtgggtggatcacttgaggccaggagtttgagaccagcctggccaacttggtgaaaccctgtctctactaaaaatacaaaaattagctggatgtggtggtgtgcacctgtaatcccagctacttgggaggctgaggcaggagaaatgccttggactcagggggcagaagttgcagtgagccaaccgagatcatgccactgcactccagcctgggtgacagagcgagactctgtctccaaaaaacaaaacaaaaacaaaaaaaccaacaattaagcgggtgggatctgggtcgggattcaggcaggctgcgtggacctcgtgggccacgtggtgggattggcctccgtgtgggtttgtgggtttggctgtggaatcctggtgccagcaggaggctatatcagacctgggaggcgggactggaggtggggtcgtggttccctgctctggggtgaggctggaacacatgggcacctccacgctgctgtgtgggtgggcctcaccttgaactttcgggtacttcatgaatgccaggaaggcgtggcgcagcgtggtgcccaccgtctcggtgccgccaaagagcaggttatgtgtggtcatcagcagggtatccatgtggaagtggctcagcgggtcctccttcttctgccgtggtagaggggtggggatatgagccagggatggagaccccttcactctagaccagtacaactgctgctgggggcccattcagtcccagctgggtttaactttctttccctgggagagctggggaacgcagaagggcagggcagggaaaatctcagctgcagggcctacaattaacttcttggatagagcttgaatgacttcttgtttttttaaaaaatacattttatgtatgtatgtatgtatgtatgtgtgtatgtatgtatgtatgtgtgtgtatgtgtgtatgtatgtatgtgtgtatgtatgtctgtatgtgtgtatgtatgtatgtgtgtatgtatgcatgtgtgtatgtgtgtatgtatgtgtatgtgtgtgtatgtatgtgtgcatgtatgtgtgtatgtgtgtatgtatgtatgatgtatgtatgtgtgtatgtgtgtatgtatgtatgtatgtgtgtgtgtatgtatgtgtgtatgtatgtgttgtagagactgggtcttactatattgtccaggctggtctcgaactcctggactcaagcgatcctcctgcctcggcctcccaaagtgctgggataacaagcctgagcaactgccccctccgccctgccccacctcctttgatgacttcttaatgagctgtaagttggcggtggctgcgagtggctcctggctccagcccagctgggccagatgcttcagcttctccagggagaaggtcccccaaccctgccccatctggggtccctgtgggtttgaggcaggggcagcaggagaatttcaggtcagactagaggtgggatttccaggtagggattacctctgccatcttggtgaggaagcagtggatgaagtcccggggagatctggggtctagcgaggcctggtggtcgtggacgctgtgggcgatgaggtctctcaggcacttgaagttctggaagatgcgttggtgcggcccaggcacccagttcaggaggctcgggaagatgtcgtacaactggggaccagacagagtaggagggttttggaggaggacgaagggtgttcaggggcgaatggggtcagtgtggattaggtaggcagggacagggtctcaaagggcagccaggtccggggtgggggttggggctgagggggagtgggaaggaggcagtggcggccataaatgctcagtggaggggagtgggcgtggccgtgtaactctgggtggggtcagatgggagggggcgggccctgggcgggccattcacagccctttccccgcccactgtttcctctccattcctagatcctgcggaccccacaccctgcccctgctggactcagttggctgacctcgccccaggggctgctcatgatttgaaagttgtcattgataaggcggataatggtgagcagacgctcatcatcatagtcgaagcggctgccgaagagcacggaacagataatgttggaccgtgagcgactcagcacaaacgtggggtcaaagggctcgcctgagggtgaagaatggaatgggtcaggaagacgcgatgtgcagcacaccagacctcatgcagcaacaccattaatttgcacaacatccgactcaaccatggcaacgtgtcttacggtgcaaacacgggcacatggtcacaacatgctgcttaacaacaccccaaaagcatctgtcaatgccacagacagcaccgaacccacagcttcctgcagcacatcgacagcaacaacgcccaaccacagaacaggttggcaacacacacacagcacgcgacatagcacaaggcaatcatcaggcatcacggaacacaacaacacagggcaacagaacacccagcaaatacgatcacagtacatgccaacacacgacacgcagtgacctaatagccagcccggaaacatcccaagacacggtaaccacacaccaacacgtaatgccagcataccgctacataatcctgccacacaacacacgctagtacacagcaacccagcagacagcacagaacacacgatgtggcatcacaacacatacagtcaaggcagcagaacaaaggacacactatgcagcaacgcaacaacgttggcagccagcagatgacacaatgcaaaatcacatgcagtgcctgacaactctacaatctcacccagaaatatctcaacacaacacgtagcatctggccgtccaacagctgaacagaccatagtaaatactgaacaacacatttctttctttccttttttcgagatgaaatctcgctccgtcgcccatgctggagtgcggtggcacgatctcagttcactgcaacgtctgcctcccaggttcaagagattctcctgcctcagcctcccaatgagctgagatcacacccggctaatttttttgtatttttagtagagatggggattcaccatgttgtccagactggtctcgaactcctgacctcaagtgatgtgcccaccttggcttcccaaagtgctaagattataggcatgagccaccgcgcctggtctagtttttgtattttttgtagatacagggtttcaccatgtcgcccaggccggtttcgaattcctgagctcaagtgatccaccaccttggcctcccaaagtgctaggattacaggcgtgagccaccatgcccggccaaaacagcatatttcaacacagcacccaggacacaatagcacagcccaaaaaaccagatctggagttagatggacgcggtttgaatcctcgttggtctcttagccttggtgtgacttgggcaaactgacttcctttttccgagcctcagtcttctcatctgtaaaatgggcctgatggcactcctctcatcctggggctactataaggagtcagtgagtgtgtgactgggagtcagtgaagggcctgacccattgcaaggctgttacagatcatggtgttgtggcaggttgtaatgccccccaaaagatgtccaggtccttatccttacaacctgtgaatttgttaccttacatggtaaaaaggaccttgcaggtgggattaagttgaggattttgagatgagaagtttactctagactgtctggctgggcctaatgtaatcacagggatcctttttagagggaggcaggagggactgagtaagaaaagataatgtaggctgggtgtggtgggtcacacctgtaatcccagaatatattgggaggttgaggaaggaggattgcttgagcacaggagtttgagactagcctgggcaacatagcaagactccctctctataaaaagttaaaagaatgagttgaatgtggtggcacatgcctgtaatcccagctacttgagaagctaaggcgggagaatcagttgagctcaggaggtcaaggctgcagtgagccaagaccataccactgcactccagcctgggcaacaagagtgaagcttcatttcaaacaaacaaacaaacaatcaaacaagtaaacaaacagaccccaaactattattttacttctggggcccagaattccaaaatcagcttcactgggataaagtcaaggtgtcagcagggctggtacctcctggagccttgataagaggatccatttcctcgccttttcagcttctggtcgcccctttattcctttgtgcgaagccccttcatccatcttcaaagcacatcactccagtctctgcttccatcctcacattgtctctctctggctcttcctgcactcctctttttttaaaattaatattgccacattattttaaattatgtacaaagacctaacatgtcactcagggaccatttcacccactgctctatttagccgccagtctcttcagcaatggtgagggtttggtgtacacattatttcatcacccaggtaataagcatagcacccgacaggtagtttttcggtcctcaccctcctcccatcttaccctcaagtaggccctgctgtttgttgttcccttttttgtgtcaatgtgtagtcaatgttcagctcccacctataagtgagaacctgtggtgtctggttttctgtccctgcattagttcacttaggatagtggcttccagctccatctatgttgctgcaaaagacattatcttgttcctttttatggctgtgtagtattccatggtgtatatataccacattttctgtctttctccttccttccttccttccttcattccttctctctctctctctttctttctttcagacagagtcttgctctgttgcccaggctggaatgcagtggtgtgatctcatctcactgcaacttctgcctcctgggttcaagtgacttctcctgcctgagcctcccaagtagctgggaatacaggtgcccgctactatgcctggctaatttttttgtatttttagtagagacggggtttcaccatgttggacaggcttggtctcgaactaccgacctcacgtaatccacccaccttggcctcccaaagtgctgggattacaggcgtgagtcaccacgcccagcccacattttctttatccagtctaccactgatgggcatttaggttgattccacatctttgctattgtgaacagtgctgctgtgaacaaaggtgtgcacgtgtcttcatggtagaacgattgatattcctttgtgtatatactcaataatgagattgctgggtcggatggtagttctattttaagtttttttagaaatcaccaaactacttttcacagtggctcttggcttaaatttggaagcagaggtacactccctttacacctgatttttaaatttcttttctccttgatcagataatatgttgacactatccaaaattcaaaagatacaaaatgatggaaagtgaaatttcttcaacccagtttcccttgccaagttgatactaatgttaccagtttccaggttattccatacacaaatatacaaatagtaacttactatatccactgtatctgtcaggttgggttggaattttttttctttttcttttaagaccgtctcactctgtctttcaggctgcagtgcagtagggcaatcttggctcactgcgacctctgcctcccgggctcaagtgattcttgggcctcagcctcctgagtagctgagattacaggtgtgtgccaccacacctggctattttttgtatttttagtagagacagggtcttgccatgttggccaagctggtcttgaattcctggtctcatgatctgcccacctcagcctcccaaagtgttgggattagaggtgtgagctcctggccattgtgctgggtattctatttgccctaccatctccactctccaccatgacctgtcttttagaagggtggcctctataaactgtaccacccatgctcccttcacctctacattaaaaaaatttttgggtttggccaatggaagtttgagagaagagcaatgtcagattattttgcttggctgtgtgatagcaatggttgtattcctctgccagaaaccatgccctcctgctgggggctctcttttacccctatacaatcagtctcggtttcggaaactactccctctcactgcacctttcaacctaaggatgatgatggcgtctccttattgtaagccatagagtgcttcaacgtcttgtagggttctttcacactgccctccactttgtaaaaagtccctccattggccaggcgcggcggctcacacctgtaatcccagcacttttggaggccgaggcgggcggatgacgaggtcaggagatcgagaccttcctggctaacatggtgaaaccctgtctctactaaaaacacaaaaaattagccgggcgtggtggcgggtgcctgtagttccagctactcgggaggctgaggcaggagaatggcctgaacccgggaggcgaagcttgcagtgagctgagatcgcgcaattgcactccagcctgggcgaaacagcgagactccgactcaaaaaaaaaagtccctccattaagcactcatatttttctgctggggttctgatggaccaagtctatcaaatgaatgcatcataatttgtttaaccaatatcttggtgcatatgttggtttcctatttttcattatgtaaacagttctttgatgaatctaggtgattttgcacactttcttgtacatcataggagacattactagaagtggagttaactgaatctgagagtatgttcttttgtaatttagagaaaagcattcacattactctcctctgaagctgtaccaatttatagttccacaaaccgtaactgagagtaaggattgctctgggaggctgaggtggtagtggatactagcctgggccctatagcgagacaccatctatacaaaaacattaaaaaaagttctactactagggtgtgggagaatgcacctgtggtcccagctgcttgggaggctgaggtgggaggattgcctgagccagggggttaaggctgcagtgaattatgattgtgacactgcattccagcctgggtgacagagcaagacactgtctcaaaaagacaaaaaaacccaccccaaacaaccaacaaaattggaggccatgatttcacacccagtgatcctaatagctcaaattttgaattagagactgtggttttaacatctgctaaattccttatgttgaggaatcactgagtcaaaggtttcagcctctttccaagggggagagcacgtggacaattacatctcatgcaggcatttggttttatggactcacgtgcttgttacaaaaccagacacagctttagggcttcttattaccttcccccacccgtccttggtagaagagtcaacaaatgacatctaagctgccaacacatattggaaaatgtttgaaacttgagatctgtggtttattatgaaacaggcagtgccctggagtttgaattttttcccagttggtcttagtaccctgtctgcagattgaggggaaagggcaggaaggggagtaaatgtagttaagagcatagcctcagctgggtgtggtggctcacgcctgtaatcccagcacactgggaggccaaggagggtggatcgcttgaggtcacaagttcaagaccagcttggtcaacatggtgaaacccccatctctactaaaaaatacaaaagttagccaggtgtggtggtaggtgcctataatcctagctactcgggaggttgaggcaggagagtcacttgaacccgggaggcagaggtttcagtgagccgagattgtgccactgcattccagcctgggtgacagagtgagactgtctcaaaaaaaaaaaaaaaaagcatagcctctagagtcaaacagatctgactactacatctgtgctaggtactttcagtggttgaatcttaatgattctgactctgtttgctcacatgtaaaatgtggatgatcatagaacctttatcacagatttgtgaagactgcattgcacactccatgaaaagttatccttagcacagcatcaggcacagggaagctcaacgccttgaaggtgctgtttttatttctaggtccctaagatcttcctcgtcctccttatggctcccccctttattctccatatttgttccttccttgaaagtcaagggtgcaggaagaagatgatatcctggaggccaagcccacacaattaggacatgtggtggacattcacctgttcttagatccactgctgctcttcctctgcttgtctatcacaaggggctgacacctgcacactaattctgtcttgagggagactgtgtaggggaacatggccatttgagttcattaggaaagggttttgaggtcaggacatgggtatctggtgtacatgggagtttggtggcctctattgtaggaggctttggaaatgtgtattgttgggaggtcctgagggaggaagtttgggatgaacatggagattctaggctgtggaggaagatgtaacatggctattggaggattctgggaccttaccttggtaccttggtaccttggtaatgaggacatcttcagctttatttttatgtatttacttttttttgagatggagtctcactctgtcacccaggttcgagtgcagtggcgtgatctcaaaatactaaaaattagctggctgtgttggtgggcacctgtagtcccagctacttgggaagctgaggcaggagaatcgcttgaacctgggaggcagtggttgcagtgagctgagatcacgtggctgcacctcagcctgggtgacagagtgagactctgtctcaaaaaaaaaaaaaatgttcatccctcagctgctcagccggcagtcgttcttttctcagtagctgttttctcctcagctttgtggagtctttccctcagcctgtgcagctctgtattcagccaatgatttgaggccactgtaagcagctctttccctttggagctctttttgtaagcaaaagctcagtttcttacgtaagaaaacccaattccccttgaggaagagaaagagctggagtcctttaaaattaactgcctgtttttctgtggctagggagccttatctctccctttgccaggcattgtgaagactctgtttctctagctgtgcagctgcaaggtcactagacagataatctcaagtcgtaaaatatgccgttccttgaaaagtaagaaatgatgtaatgcatgtctctactgaataagtgtctttgtttctcgcttctgttgtatgcttccccctgcacagatctcttcctgccccagaaatgcttaaaaggtaactggactctttgtttggggctcagtcattttggatgttgatctgactgggccggtgcacctaaataataataagaaatcctcctcaacccctcagtctctctgattcctaaattatctcactgcaaaggcaggagaattgcttgagcccaggagtctgagaccaacctgggcaacatagtgagaccctgtctctacaaaagattaaaaaattagccaggcattgtggcgcatgcctgtggtcccagctactcgggaggctgaggtggaaggattgcttgagcccaagaggtcctggctatggtgagctatgatcacaccactgccttccagcctgagtgacagagcaagaccttgtctcaaaaaaaaaaaaaaaaaaaattgggctgggcatgatgccccaggcctgtaatcccagcactttgggaggctgaggttggtggatcacctgaggtcaggagttcaagaccagcctgtcaaacgtggtgaaaccctgtctctactgaaaaatacaaaaattagccaggtgtggttgtgtgcacctgtagtcccagctactcgggaggctgagacaggggcctaggattaaataaggagttttggcaaaactaggctggaactccaaaacctgctacataagtactcacgagggttgctagttattagtattattactttgttgttatttggctctggtcagatttcaattaacgtcacaataggatttaaacatttcttttattatttttaagattttaggccaggcgcactggttcccagcacgttgggaggccgacgggggtggatcaccagaggtcaggggttggagaccagcgtggccaacacagtgaaaccccttttttactaaaaatacaaaaaaattagctgggcgtggtggcatatgcctgtaaccccagctattcgggaggctgaggccaggagtttgagactagcctggggaaatagtgagaccttgtctctaccaaaacaaaacaaaacaaccaacaacattaggccaggcgtggtggctcacacctgtaatcccagtactttggggggctgaggcgggtggtggattgcctgaggtcaggggtttgagaccagcctgggcaacatagtgaaactctgtctctactaaaatacaaaaattagctgggcatggtggtgggcacctgtaatcccagctacttgggaggctgaggcaggagaatcgcttgaacctgggaggcggaggttgcagtgatccatgatccggccattgcgctccagcctgggtgacgaaagtgaaattccatctcaaaaaaaaaaaaagttagctggatgctggatgtggtggcatgtgcctatagtcagccactcagaaggctgaggtgggaggatcacttgagcctaggagttcaaggctgcagggagccgtgatcataccactgcactccagcctgggcaacacagcagactctgtctcaattaaaaaaaaaaaaagcgcagaagaatattggtttatggagagtattattttaagttttagaaattttctatgcaaaacaaacaatggaaaataagaaatgcattactctataataaaatatagccttttctctcccatatatatatatgagtggataaaaacagtcataacttcctacacatttaatcctctatactaactctcatacccacttaccactccctcaatgacaaacataccaaaaagatgctaaataaatgaaaacaatactttgtattcttaactatgtaaagtattgtacttaacaggtattttcttggctgactggttctccatacccaacaaacacagtgatgtcaactctcaccactcatattaaacaatatagccattgctgtaaagtacaaaagagaaatgcagtacaaattgaaaaggaggaaataaaacttttattcatcgctgatattatcagatacataaaatcccaaggagacaaaagctactactaatgagattagaaggatcccagaaacagacacagacgtgcacacacacctccccacagacacagatacacactcacaacacactcagaagtacattttattttattttgagacagtctcgctgtgtcacccaggctggagtgcagtggctccatctcagctcactgcaacctccgcctcctgggttcaagcgattctcctgcctcagcctccccagtaggtgggattacagatgtgcaccaccatgcccggctaattttttgtatttttagtagagatggagtttcaccatgttggccaggctggttttgaactcctgacctcaagtgatccactcgctttggcttcacaaagtgctaggattacaggtgtgagccaccacacccagccagaagtatcttttaaacaggatttttaaaagtgggagttgaccctttccaaaatctggagttgggatgggcattagtggtttggagaggaaagagcaggtgtgttgtggctgggaggcgattcctttcagcaccttgggtgatgtctgaggccatacccactttctgtgctatttttgggattatgatgattaacccacactccctttgttcctcccatgtaacctggattcttgggcattcaaccaatattaaacccttcctctgaaaaattcctggattgacaagagcacactggacccatttccattccccatcgtgatcaataggtatcaaaagaaatgatagcttcttagaatagaaatttgcagccactggggaatgtagttcttaaatgtgaatacagaagaatctcttattacaaaattctgtatggctctggatttaagattttgttattttttatttttgagacatggtctctctctgtcactcaggctggagtgtggtggcatgatctcggctcactgcagcctctgcctcccaggctgaagcaatcctcccacctcatcctcccacctcatcctcctgaggagctgggaccataggtgcgcacgaccacacccagctatctttttgtatttttatattttgccaagttgcccaggctagtctcgaacttctgagctcaagcaatctacccaccttggcctctcaaagtgtcgggattacaggtgtgagccactgcagacagccaggatttaagattttaagagatattgaaagccttttgttataataccattgaaaacataaaatacttaaaattaacaaaagttgtgcaatagcataactacaaatcattgatgagagaaattaagtatctaaatgaagagatttatcatggccacgaattagaagacttaatattgttaagatgtcagttcttctgaaattgatcaacagattacttgtaatcccaataaaaatttcagcaggctgtttttgttttggtataaattagtaacatgattttaaaattctaagctgtggctgggcaaggtatctcacgcctgtaatcccagcactttgggaggctgaggcgggcagttcaccttaggtcaggagcttgagaccagcctggccaacatggcaaaaccctgtttctactaaaagtacaaaaattagctgggcatggtgttgggcacttgtaatcccagctacttgggaggctgaggcaggagaatcacttgaacccgggaggcagaggttacagtgagccgagttcgtgccactgcactccagcctgggcgacagagcgagactctgtctcaaaaaaaaaaaaaaaaaaaaaattctaggacgtatatcttttacaactactagtcaaagtaattataaaagagtaacaggccgggcgcggtggctcacgcctgtaatcccagcactttgggaggccgaggcgggcggatcacgaggtcaggagatcaagaccatcctggctaacatggtgaaaccccgtctctactaaaaatacaaaaaattagctgggtgtggtggcgggcgcctgtagtcccagctactccggaggctgaggcaggagaatggcgtgaacccgggagacggagcttgcagtgagcggagattgtgccactgcactccagcctgggcgacagagcaagactccatctcaaaaaaaaaaaaaaaaaaaaaaaagagtaacgaattcagagggctcaccttattttacaataaagtagtgtaggcatatactgatcaatgaaacagaaaagaaggtctagaaacagacacttatataatcaactgatttttgattaaggtgccaaagctattcaatgggagaaaggaaagtcttttaacgaaagtgttggaataactgaatttccttaaggaaaaaatatgcttttgctcttatttcacgctatatttaaaaattaactcataatgactcagacttaaaagtaaaagctataactatgaattcttcaaaagaaagcataggagaaaatctttgtgaacttggggtagacaaagatttttaaaatggaaaaatcgatcatagttctttatttggaaattaaaataaaaatgccataagcaatgacacaaaaaatggcatacctagcattacatttggcttacatttagtgtaagatctacacagtaaaacccgctaaacattgctgtgtcatgttgaggaattttttccttccttcccttccttccttcctccctccctctttcttttcttttctcttttctctttctttctttcctttctttctttcttttcttccttcctttctttctttttctttctttcctttctttctttccttcctttctccatctcttcctcctttcctccctccctcccttttattttccttccttccttccttccttctccctctctttttttttttttttaagacagagtctccctctgtcatttaggctggagtgcagtggcacgatcacagctcactgcagccttgtcctcccaggctcaagccatcctcccaccttagccttccaagtagctgggactacaggtgcacatcaccatgcccagccaatttttgtattttttgtaaagacagggtttcaccattttgccaaggctggtcttgaactcctgagctcaagcggtcctgcctgccttggcctcccaaagtgctgggattacaggtgtgagccaccgcacctggccaatcttttctttttctttcatgaaagttgtactatttatggagtacatgtgatgttttgacacatagacaaaatgtgtaataatcgaatcaaagaaattcggatatccataacttcaggcatttatcatttctctgtattaggcacattccaattccactctcagttattttgaaatatactataaatcattgttaactacattcaccctattgtgctaccaaacactagatcttattctttccatataactgtatttttgtacccattaaccatctcctttttatcctcccttctccactaccctttttagcttctgctaaccatcattatacctctacctccatgagttcaattttttttagctgtcccatagtagtgagaacatgtggcctttgtcttcctgtgcctggcttgtttcacttaatgtaatgtcctccagttgcaactgtgttgtaaatgcaggatctcattcatttttatgactgaatagtactcctttttgtgaattttctttatccattctatccacattttctttatccattcatctgttgatggacagtcaggttatttccaaatcttggctactgtgaatagtgctgcagtaaacataggagtgtggatatatcttggatatactgatgtcttttctttggatatatacggtgggattgctggatcatagggtcattttatttttagtgttttggggaacctccaaactgttttccatagtggttgtactgatttagatttccaccaagagatatgtatgagagttcccttttctccacattcttgccagcatttgttattgcctgtcttttggataaaagccatttgaactagggtgagatgacatcttattgtagttttgatttgcatttctctgatgataattatgttgagcactgatatggtttggatctgtgtccccaccaaatctcatgttgaattgtagctcccaatgttggaggtggggtctgctggagggtggttggatttctcatgaatagtttcatactgtcctcttggtgctgttcttgtgatagtgagttctcatgagatttggttattcaaaagcgtacagcacctccccgctcactctctcttgctcctgcttccgccgtctaagatgccttactccctctttgctttctgccatgattggcagtttcttgaggcctctccagaagcagaagctgctgtgcttcctgtacagcctacaaaactgtaagccaattaaaactcttttctttataaattacccagtctcaggtatttctttatagcagcgtgagaatggattaatacaagtctcaggtatttcttttcttttttttgagatggagtctcactgtgtcgcccaggctggagtgcagtggtgtgatcttggctcactacaacctctgcctcccaggttcaagcaattctcatgcctcagcctcccaggtagctgggactacaggtgcccagcaccacgcctgactaactttttttgtatttttagtagagacagggtttcaccatgttggccaggctggtttggaactcctgacctcaggcgatctgcccgctttggcctcccacagtgctggggttacaggcatgagccaccgtgccatcaggtatttctttatagcagtgtgagaacggattaatactagcaccttttcatatacctgtttgccatttgtatgtcttcttttgagaaatgtctattcaaatcttttattaattttaaattggattattagatttttttcctattgagttgtttgagctccttatatttttttgtgaattattctttgtcagatggaaaacttgcagatatttattttcttccactctgtaggttgtctcttcactttgttgattgtttcctttgctgtgtagaagcgttttaacttgatgtgatcccatttgtccatttttgctttggttccctgtgcttgttgggtattactcgagaaatctttacccagtgcaatgtcctggagagctttctcagtgttttctttagtagtttcatgtttgaggtcatagatttaagtctatgatccattttgatttgatttttgcatatgtcaaaaaataggggtctagtttcattcttctgcatatagatgtccagttttcttggcattgtttattgaagtgactgttatttccccagtgtatgaatgttcttggcacctttgttgaaattgaattcactgtagatgtatgaagttgtttttgggctctttattatgttccatcggtctacgtaacttgttatgctagtaccttgttgttttggttactatagctctataatacgatttgaagtcagataatgggattcctccaattttgttctttttgcttaggatagctttggctactctagatcttttgtggttctgtttaaattttagaattgttttttctgtttctgtgaagaatgtcattggtattttgataggaattgcattgaatctgtagattgctttgagtagtatgaacattttaacaatattgcttcttctaatctcactgtgtcgcccaggctggagtgcagtggctccatctcagctcgctgcaacctctgccttatgggttcaggcaattctcccacctcagcctcccaagtggctgcaactgcaggcgcatgccaccgtgcccggctaatttttgtatttttagtagagatggggtttcaccatgttggccaggctggtctcgaattcctgacctcaagtgatctgcccacctcggcctcccatagtgctataattaacagtatgagccatcaagccctgccgtatttcattgtatgaacatattacagttcatttatccattcacttgttgaagaacatcttggttgcttacaagatttggcaattatgaataaagctgctataaacatctgtgcagaggtttttgtgttgctatatgttttcaactcatttgggttaataccgaagaacatgattgctgtagcacatggtaagaatatgtttagctttgcaagaaaccgccaaattgtctttcaaagtagctgtgtcattttgcattcccaccatcaatgaatgacagttcctgttgagccacctccttgtcagcatttgatgttgtcagctttggattttagccattctaataggtgagtagtggtacatcattattgtttcaatttgaaatggctactgacatatgatatggagcatctttccttatgcttatttgctatgtgtatattttctttggtgaggtgtctgctcagatcgtttgcccattctttaattgggttgttttctattgagttttaacagttctttgtgtattttgaatgtaagtcccttatcaggtatgtcccctgcaaatatgttctcctagtctgtagcttgtattgtcattctcttgacaattcttttgcagagcagaagcttctaattttaatgacacagaacttatcaattgcttctttcaaggattgtgcttttggtgttgtatctaataagccatcaccaaacttaaggtcatctagattttctcctacattatcttctagaagttttgtactcactattcatttaggtctacaataaacttggagttaattttcgtgaaagccgtaagggagcttctaagggggacacacactaacttctttgagagtgggcagtgattgtgaaactctcagctgggtcttacaacagaccccagatccatcaggagagcccagccttcagaacccatagtggaatatgtttcatgcatacacggaggagaatatgcagtcatatgctcacatgcatgtctgaacatgatcacacacatgaatatggctatgtcctgatccagagttctctcattctctgtaagtgattctttccttcaacttcttcattaagggatatattgacagaatgtcattaaaattaaaaacttctgctctgcaaaaaattgttaatggactgactctgtatgtccattcatgtctcgttgtgtccctggactgactctgaatgggctacagtggccttatctggtagcaagcacagattacacccgggtattcaaagcatgttgagtaggtgagagtgtgggcatgtgtgcagtgaaggcaggacagccacccgccaggtctctggaaaactccccaggacagggatgttcaggccatgtgatgctatactaagctgttttacgtgaggaataggtgctttttaagaatctgtctagaaggctatgggcacagatctgtgttcaaagattttctgggcacttatgttttgtgagacatcagagacaactttctaagcctcagttttgtcacgtgtaaaatgggcatgaacgcccttcgcagaggtttgtggcaattaggtgagcgtgcaatggtttttgaacaaaggtgacacgggggtacgtgctcaggaaataagagctgctattattactactcttcatagcataatgtaagggtttccttcctctcatcccagctcggaagcaccttatcaaggtgaactgagccgcttctgtttcttctcttccctctagccaccacgccccttcctttccgccatcctgcccccagtcttagctgcgcccctctcccaagcccggtcttggccctgccctttccctggccccgcccaccagacctgcaccggcacagccctcgctcagcggggcaggaagctcatggtgtagtttcgtgggatcgtggcaaagcccacgtgtttgggggacacgtcaatgtccttaggtgactgggaggacttgaggcggaagttctgcatgacggtggtgaagaagagaaagagctccattctggccaggccttctccgaaacagttccgctttcctgaggaggagaggcgggaggggtggaggtgaagcccactctcagtgcagcctcgccccagtaccgacctccagctgcggctctcccagggaggaagggtggaatattatggcctgagagagtttcagaggaggctctgatcctccctgagcctcaatttctttctataagagatgtaacaatggtgaaccaatattgatatattattactaacaaagtccatagtttacattagggtttactctgtgttatacagttctatgggttttgaaaaaggcataatgtcacacatccatcatagatggggtgatccatgccaggtgtagcaatgggaggtttagatgtcctttcctgccaggtacacttgcaaatatgactgctgtgccgtcatctcctttttagggatctgaggaatctgctgtgtgaccctagagaaatacatctacggggaaagatgtttcctttcattttacctgggcgcaggtactgggtgcttggtagttaaggaagtatcagctgctggctcaagggtagattctaacaggaacttccaagctggagaaataccaggctacaccgcagagaggggaggagggtgagggaggcccctgctggtgtgagccgtggcctggcagcaaacagtggtctcttaccgatggaaaagggcacaaaagcatcactcttcttaaactgccccttctcattcaggaagtgctggggattgaagtcctgggggttggagaagaaactggggtctctcagcacagagcccagcatagggtacacttcggtgccctggtagggaggaggaagttgtgtgtgatgaggagggtcgggggattggtgaaagtacacaggggctggagggggaactagtgtgccccaggtaaggggaagtggcaggcatggaggagttggggtcctctgatggaggagctttgggggatagaaggttcacatctctgaaacaggaagtttgggagacatggggtccatgtccttctaggcaggagtttgggggacctgagatttctgtccctatgacaaaaggccgaatggaaagggggcttctgtttcttaagataggaagtttgggaacatgtgtttgattctcctgacacaaagagtctggagagatgcaggactcaggagtgtctaagtggaaaggtggaacggatgtggtggttggggaagtcttttttgactgattgagggagtgggacagggtctagaaagcttctaatgtgggtgggatgctggggacacagagaggggctggaagtccccgtagtctggggggtgggggcggatagcaccttagggaggaagaaatcccgaaacttggtgtcctttttgactctgcgggccaaactcatggggatcacgtctccaaatctttggatctcgtggatcactgcctccatgtagggcatcttggcccggtcctcaaacttgggctgccggttcttgccgatcactctgtcaatctcctcatggaccttggctgggggaggagggggaatgtgtttaggtatctaggggtctcagagcaggaaatgatagtccgaataggcaaaatggggtggatgatatggctccgcctatgagacggaagtagagcattcataacagaacagacatcagccattcgcattgttggagtaggatcctgttaaccaggttgtgccagaatcacaggggaggcacagggaggaacttaggggatgacccggtggaacgggcagtgggcactcagtgggcttgggacagaagtgactgaccaatcagtgcagacattttcaatattttaatatctaatgagactcagctgatgcctaccagctgaatgttgccctgtctctggacagcaagtcacgtctcagggtcccgggatctgggacaggtggggacattgcaccagtcgaaggggaattttgagggtctggggccctccacttccgtccccctccagccttaccctccacctctgggtgcttcatgagcagcaagaagccatagcgcagggtggtgctgacggtctcggtgcccccaatgaagaggttcaacgtggtcatcaccaggtttttcaagtagaactccgtgttggggttcttctcctcctgcagggagagggggctttaggccaacctcactcctcttgccctcagggcccttctagggcttttcctttggatctacctctctttggttcagaccaaaggtggaaagagggaccctagatctaccagactcgctctaggttccagcccttgccctggctgctggctttgcccaaaatgctcttccttctcaccttctttaccttgctgaccatctgtccttcaattatcaacttagctgtcagtttttttttgtttttttttttcttatactgacttggtcttgctaagttgcacaggccggactccaactcctgagctcaagcaatcctccagcctcagcctcctgagtagctggaactgcacatgcgcatgaccatgcaggctcacttactttttaaacaattaattaattttttttgacacagggcctcattctgtcacccagactggagtgcaatgccgtgatcttggctcattgcaacctctgccccccttcgcgccaccatgcccaactaatttttggatttttagtagagacggggtttgaccatgttggccaggctggtctcgaactcctgacctcaggtgatccacctgcctcggcctcccaaagtgctgggattacaggctgttagccacggcacccagccaattgtgaggattattatgatgagggttaatttgaatgggcctgtgtcatctgcctgccccactcccagactgatttccctctgcctggctttgcatctccccgcagtggctgctggggtgtacctcctgcatgcggatgagaaaggagtcaatgaagtcccgtggggaattgggatccagcgtgcgctggttgtgctccaccttcttggctatgaagtcctccagcccttgcagcaactgaaaggcctgttgctgtggtcctggcaggtgtttcatcaccgaagagaacatctcatagagctggggttgcagagagaggatgggaagggaaggacagctgtcacggggcaggagctgatgggaatgggatttgtttcatagcaaggaaggaactgagttaaaggcatctgtctcgttgtttaggtatttcagtggggccggataggaacttatatctaagttttcaggaaggttaggtaccagggccacggtctagtaatttaggtgagaagaactgagacatatatccaggtttcaggtatttaaacgaggctggattggagcacacatctaggtgttcagatattcaagtgaagttgagttggaagacacctgtccaggtgtttagctcttcaggtggggctggtatgaggtgagtgtcacctgtctaggtatttaggcattcaagtaggcttggttggagacagctgtccagatacttactgggtctggattgggggcttttgttcaggtgctcaggtattaaagtggggctggtgaagatgttgaagtggaggggatacctgttgaggtgtttacctatccaagtgggatgcactgggagcacctctgtaaggtgtgtgattggaaagggttggggaacacttatttgtgtgtcagggaacaatctgtctagatatttatgtgtttaaggtgttggttagggcagctgtccatgttttcaggtatttaagtgggtgaagtagagggcgcttggccagatattccagtgggctaatctgggacatttgtgtagatgtgaaatgattatgatgggctggattttgcagcaccaggtgttcaggtatgcaggaggccggttgacgcagtcacttgtccaggtgttaaaatattcagaagaactgggtagggagcatctgttagaaattacggtaagttggggatgggaacacgtgcccaggtgagagagctgagctgagggtatgcatcctgccagcaggctctgttttggggagcatctgttgagctatccaggtgtccttggagacagggtattggacatccatcctgggttctggtgcaactgtccagttgtccaatatcggggactgattttgaggggacactgtctggagggcggtgggagtttggggcacctgtctccaggtaggggagcagttggcaggttgtggtaggggcgtcacgggccgggctgcagccagttacctgccccgtggaggttgacgtgaactggaagattcctagcatcatgcgcaacagtgacaggaactctttgtccttatagtcaaagcggtccccaaagacaatggagctgatgacattggagactgtgcggctcaggaagaaggtgggatcgatattggcgcctgcgggtatggcgggagaagggggttggggagagagtcaactcagaggtctgaggagagtcagaattccaggaggcagggccttgttgagccaaattcccagcgccagactccagggctggaagtgcgggcgcctttccccacctagtccccatccccaggcagaacgcgcgcgggttcctcgtcctgggtgttttccttctcctgcccccgcactcggggtcccctgctcaccgccagtgccccggagggcgtcgatgaggaagcccgcctcctcctggatgcgctcctcgatgcctcgcttgcccaccccgaagtcccgcagggtggcgatggagaagcgccggagctgcttggcgcgctccccgttgctgaataccacgcctggggaggtgaacgcgggaatggagacaggccagggggcggcaggggcaggagcggagcagctccaaggggctccccaagggtggaggagagagggagtagggtgggagagagatggattcagcgccattgcccagcagagctgcaaactcagtcagagaaacacgatgtcgaggtagagagagagagagagagagagagagagagagagagaagagagagaggagagagagagagagagagagagaagagagagaggagagagagagagaagagagagaggagagagagagagagagagagagagagagagagagagagagagaccaggtttaaagaataagacaatcagaaaagaaacagaaaggccagacagagagatgcacatagaaacagagggataaggggacactccatggaggaagggaaggaagtggggagagaaagagagtgatggaggaagaggatggagggaggggaagtgagatatggggagatctgggaggaggaaataaaaatggtgaaagattcttaagctgagctggagaagagagaaaaatattgagatagaaacagagagggtctggaaggaagagagactgttaccaggagatggaggctgaagatgtggaagtaggaataccctgaaatcctaagacagaggaagaagtgagaaagggatgcggagagatgagaaacacagagaagcccagaagctaagagggacaaaaagacaaatgaagacagagaaccagggctggaaaacagaaacccaggatgtccttagagatggagagagaggggaaagaggagactccagtgagagagaataaggaggtggggcagagagaggcagggaggaatcaggacagggacgctggagacaggtgagggatacacatggagaggccacaatgaagggagatggggagggaagaccagactggggactctgccttagcctccagttggcaggagagtcagggagaaggctgggaacactgagaccttcgtgtccacctggccaccttccccctcttgggcaccccctcaccatagcctttgaagacccagtcgaaggtggcttgctcgcctcgcccgctgaactcctcagcctggtccaccagagcctccctgacggcatcatgtccacacagcaccacgacccgccggggccccaagtgaatggtgaacacggggccatagcgctcactgatctgatggaggtgggtgggagtggttagagggagaagcctccactctgaatggggcccagcaccgagatgtcatgtgctgggatgcttcgcacccaggttctcacagtcagggagctggacatcccaagatcctgtctttctgatgctgaaactccaaaactccatttcctaagactctggtccacactggtcaaccccctgccacaaagccccagccaactaggcagcccccaccccgtgccacccatctccctgccttgggacaccttcatgagggagttgtacatctgctctgtgttcagctgcaggtagtttccaatgaagggcaatggggtgggtcccggaggcagcttccccttgctcttcctctgctgccaaacagacatcaagaccattacagtcaggcagaccagcaaggccaccagaagcatccctgaggccagcatggtggtagtgggatgatagatggtgacggctggggtggtttgcctttatactgcctgaaaaagagggatggactttggctgattacataattacctcatttcacctcccaactacatgccccaccatgaatcctgcctagcttgggacacagccagcaagggaggataaggggaccccagggcagctgaacagagagggggcctccagactaaatctgtggtacttcaggaggggtgccgcagggctgtggatttaggagggggcaacagataagctgtagaactgaggagtttggaatatttgcataggggagcacttgggctttggatttggggtctgagagtgagaatgcaccccaaagttgtggatctgggggttccaggggagaggaatccaaaggtctgggttttattagggtaagacaaagtgtggctgtgcatttaggggtcttctgttgtggaggatgcagggttaagggtctcaggaagggggattccaggcatatggacttgaaagtctcggggctaggaagacccagggctgtgggtgtggagtttctgggaggaggagtgtgtagcaagcccagcgggttctcccagaaagcccagcagcccagcactgggtccaggggctgacttgattttgcttttgcccagagctgtctcttgatgcccagaatcctcattggaacctcagagtgaggccaggatgggtgccatagaacctccactgcccatctctgattgggaaggggaggaagaccagagccatatttcaggggaactttccccacacctggagaagagtacctggagttagcggttggcagagggattggctaggtctggagaaatagtaataacaacccccaaatggtggaaaaatctcaagtgtcccaagggttgtccgctggtttccaacccagatcctcagggaaacccactagattgattgtatcatccctattaatattatgattgttgtttatgtttctcattttatataaagatctacagaggacagaaaacagacagtgggcaggggacatgtgtgagtggccctgaactcccatctctcctgctctgtgtacttagttcccctttctggatttggttttcctgccagtggaaagggagtgtttgggaagagaagatcacattcgagggtgagttaagtctcctttaagaatgattcctgctttgtcaggggctactactattagcaggcagagggaacagtggcagaagagattggggtaaactccagtattaggcacagaggcagatcctggggtgggtgtgagtggagaagggatgagtagccctcctgtccttccctcagggaaattcttccttagtaaacaggacagttaccctttggtgagcatggtcgtatacgggaagattaagtctaggtgtgtatgatctggttgaatctttgtaacaatgaggttggttcatcatgatcatcctcattttgaagatgagcagatctagactccataaatcctcttgagtgaggtcacacagggagtaagtgagggagctgggatgtgaactttctcctcaccccccttcattgactggcctagatcaccctgggagtcaagtgcaggccagccttagcaggaggtgagtgctgggactggcatcagcagtggacacactgatgacattggtgggttctgatatcagcatcaggtatggccagggagggaaaggcatcgtgttggctttgggactgcccccaggtgtatgcgaggatgggaaacaagttggcactgaacttgacaccaggagaatattgaagtcatgtttggtgccaagagggctctgtgtgttgtctcaggtgtcattgagggcataagagtgtcctgcttcaggagggcgtaagggtggcaccatatagggtctgaggttggtcccagtgggctgtgacatgagcatgaggcaggtgctgatattggtcctatgtgggtctgagatgagcctcagccagaccctgagaggggccccagatggccacaggacaggctgtggtggttggaccatttagggttgcacctgtcctctgggtcaccaactttggacaagtggaggtgggtgaggttggcacccccaggactgacatcttgctcaaactgttctaggatgctgagctctgagacctgtgtggagggaacaaaggtcagagaacaaggcagagagaggaaagttgtttgttgattttggaggggaagaggtgggaaggaagattagcaccagcttggcagatatcaatcgctctaatcctgttcaccagtctgcacctgggcctggctcctccttttccttcgtgtttcttaaaaaggtgggagacagaaatctggggagtttgtttctcactggggttggcactaggaagtgcactgagtgatcagcaggttgccatgacctggccagggaggggatggggagagacaggttgggagaactctagtatttgtggacatagaggtcaatgaattttggacttgttgattaccctagagcatggagtgagagaatggtgtctgaaatcatgtgggagggacttgtcccagtgggcagtgtcttgggaacaggctttcagagtgagttagtggcgagcccaggaagatccctttcctttgctgggcctcagtttccctttctgaatggatggtgcaatgattaaggcctggattggaatcctaaccttatcctttctttgttgtgtggctttgaacagctgacttcatctctctgagtcttatggagccaagaacagctcctacctctttggctatttaggggagaagtataagtgttaatgcagatgaggtacatggcagtaagtgctcaatgaatggtagttgttctctttaatctgtaggatgaagcggatggatgagatgttccctaagcacattccttgcttttacattctctagtctaaagctcacaaatcttttcctttgggaaggaggaaagggacagagtctttgggaacctccttcgccatcccttcctcagcacagccaagctttaccccatggagctgtgaataggaaattaatccttcatggcctcctggagtgtggtgctgagttaggcagtatctgcggaaggacaggccagcattagactctcaggttattctggttggccctggagccctgcacaggactttgcccacctgtctgtctatgcttgtcttggatcccatctttctatctttctctttctccttccctgcaagtcagtgttcccctcaatcaccctgtgtgctcatgcatctttgtgttttgtgccattttgtccagtgggttctcctggatgcctctgccatgtttatcctcatttatacaactgtgtgtgtgtcattctgggtgcatgcttttagtgtctacgtgtatgtatgtttcagcatgttcatgttgatacatgaatttatgtgtgcaccaggctttgtggtgtgtatgtttgtgcttgataatgggtatccattccaacttatgtctgcacatgcacatgtgtgtgtgtgcctgacagggtgtggcactgtttctcaatgcttgccaatctttgtgtctgtctctgcatacagcatgtgtgcacacatgatttaggggtgtctacgatgtgtatttctgtgtagaacaagatgaatgctgcatattcatatttgtgtgtatacattcacaattgggtgactacatataagtatgtggatgtttttttctttgtttttttttttgagacagagtcttgctctgtccccacgctggggggcagtggcatggtctcggctggaacctctgcctcccaggtttacaccattcatctgcctcagcctgctgagtggctggggctacaggtgcctgccaccatgcccggctaattttttgtatttttagtagagatggggtttcaccatgttagccaggatggtctcgatctcctgacctcatgatccgcccgcctcggactcccaaagtgctgggattacaggtgtgagccaccgtgcccggccagtacgtggatgttttcatgtgttcattctggtgtgtgtgtgcagacttgtgggccatgttgcatacacgtgaacatgtgatattttcctgtgctcatctgtgtttggattaaaacagtcctatcccagctccatttatctgcttgaaaaaacccccagaactgcaggaagctttttatgagcataatcttaattgaactcctgattgcaagactgaggttagctttatcatctccattttgcaaatgagttagataagttcccccaaagccggtcataagtgacttgcttctgcatttcacagctaatgagtgtagagtcttagtatggtcttgtgtgatggtaaattttttttttttgagatggagtttcgctcttttgctcttgttgcccaggctcgagtgcaatggtgcgatcttggctcactgcaacctctgcctcctgggttcaagtgattctccagcctcagcctcccgagtagctgggattatagccaccagacacagctcatttttctatttttagtagacacggggttcaccatatttgtcaggctggtttcaaactcctgacctcaggtgatctgcccacttcggcctcccaaagtgctgggattacaggcatgagctaccacgcctggctgtgaatgtaagtttcatgctgttaatcaccactttggactgctaggccccacctgtttttctttatgaaacattagaaaaactgcttgtactcccttgtatttcttcaaatacttccgtgtaaacatgtaacaaaagatttcaaaatgttagaaaaaaaaagtcttttaataggagggagacttgaccttctatagtgtttgcactctttggaaccttaagcaaagacctagttggccagtatagccctcatgccattggcaatgaagcagtgggggagttggggtattagtggttgtggtcagagagtgaaatgtctgtgtttcacatttcagattgatgacaaggatttggggggtggggctgtgggaatgttggctgaaaatagagtgaagaaggtcaaagaagagaagacagtcaagattctttttttctgagtgtttggatagctcacatccatggccatgaagttcctccctaccaggaaaatggcaggacttagagttcagagatgggacatttagtaaatagtgctacaataaacatgaaagtgcctcaacatactaattttttttttgaggcagagtctcactctgttgcccaggctggagtgcagtggtgcgatctcagctcactgcaacctctgcctctcgggttcaagcaattctcctgcctcagcctcccaagtagctgggactatagacgtgcaccaccatgctgggctaatgtttgtatttttagtagagacagggtttcattatgttggccaggctggtcttgaactcctgaccttaagtgatccgcccatttggcctcgcaaagtgctgggattacaggtgtgaaccactgtgcccggccagctacacactaccagatctcacgagaactcactatcatgagaatggcaagggggacatctgccccctgattcaatcgtctctcaccaggcctctcttccaatattcgggattacaattcaacatgagattggggtagggacacagacccaaactatatcaccttctctgtggtaggttatattgttttatatttttatttttttgagacaaggtcttgcttcatcgccaggctgcagtgcagtggcatgatcatgggtcactgtagccttgacttcctgaggctcaaatgatcctcttatcctcttatctcagtctcccaagaagcatgccaccatgcatagcacattaaaaaatttttcttgtagagagaggtctccttatgttgcccaggctgatcttgaactcctgggatcaagtgattctcctgcctcatcctcccaaagtgctaagattttagacatgagccaccccacccagtgattatattgttttatttatttatttatttattgagacagaatcttgctctgttgcccagactggagtgcagtggtgtgatctcggctcacagcgacctccacctcccaggttcaagtgatacgcctgccttctgctgctgaatagctgggactacaggcgcccaccatcacgcccatctaacttttgtatttttagtagagatggggtttttcgccttgttggccaggctgctctcaaactcctgacctcaagtgttctccccaccttggcctctcaaagtgctgggattacaggggtgagccaccacgcccagcttatattgtgttgaaaatgttttcttctctcccactggtcctttccttaggtaagaattacactttcctctaccccatggacaggcttggctgtctacttgctttggccatgactcctatcaactctttttctttttttttttttttagacagagtttcgctgttgtcgcccagcctggagtgcaatggtgcaatctcggctcgctgcaacctccacctcctggattcaagccattcttctgcctgagcctcccaagtaactgggattacaggcacacgccacaacgcctggctaattttctttgtatttttagatggggtttcactgtgttggtcaggctggtctcgaactcctgacctcaggtgatctgcccgcctcggcctcccaaagtgctgggatgacaggcgtgagccaccgtgcccggccaactctgttttgttttttttttttttttgagaaggagtctcgttctgtcgcccatgctggagtgcagtggcgagatctcagttcactgcaacctccgcctccagggttcaattgattctcatgcctcagcctcctgagtagctgggattacaggcacatgccaccatgcctggctaattttgtatgtatatgtgtgtgtatatatatatatatacacatatacctgtatattcagtagacacggggttttactatattggccaggctagtcttgaactcctgacctcaactgatatgccggcctcggcctcccaaaatgctgggattacagacatgagccactgcttccagcctaactctgttttataccaaaggtctcactgggctccagtaactacttcctccatttccactctcagggatggggtggcaatggagccccactgttatgggcttccaggatttcccttaatgctgccctcaactttgtaaatagtcctatcattaaactctcaattatcctgtttgtgtatgacttatcattcctgctgggatcctaacccacacagcacttcattgtatggatgaaccatttatttagccagttctttaatgatgaacatttaggtcatttccaatctttcactattaaataaaactgcagtaaataaacttgtatataggtgatttttcacatagtcaaatacaactacaggataaattattatatatggagttgctgaatcaaataatgctgtttaaaaataattttgactgatattgtcaaatcatgtatagaggtgtacagccctattagcagaggataaggatggggacttttcctttggagcaagcccagaatcctgaatgttccaacagctgaagatgaggactgctaagagaactcaaggtaaagaacattagatttctggcaaataggtgtaggtgggtatcttgagtaattcattgaataaatgaagtgtgtaactgtgtttgttccccatcttggaatttttaaaaattattgcttttagatggagtctcactctgtcacccaggctgtagtgcagtggtgagatctcgcctcactgcaacctccacctcccaagttcatgcaattcttgagcctcagcttctccagtaggtgggactacagacacacaccaccacacctggttaatttcttttgtatttttagtagaaacggggttttaccattttggcgaggctggtcccgaactcctgacctcaagtgatctaccagccttggtctccccaggtgctgggattatagatgtgagccaccgtacccagaggatattgttgattataattgttacagaagttttcgaaggtttgtattagaaaatgttaagtctcagaggactgtcttagttcattttgtgttgctataacataataccagagactaggtaatttacacagaaaagagacttatttggcttatgattctggtgactggaaagtccagagcataatgccagtgtctgcttggcttctgtgatggctttcatgctgtatcataacatggcatgaggtcgaaggggaagtagacatttgtgaagggtcaacacatgagcggtgtcctcaatttataacagtctgcccttgaaggaatgaatccattcccatgagaacgaatcctgttttgcaaaatgagacctcactcactaccttgagaaaggcaacaagccacccacgagggtggagctcatgtgacctatgtgcctcccatcaggcctcacctcttaaaggtttcacctcccagcattaccgaaccgggaattcaggggttccagcatgaattttgacaggaacactcaaactatagcagaaactatgaccctacagatagtgattgtaatatttcaagtctttggtatagagactgtaatttccaagatttcatgaatctttctttcatacatggaaggctgggtaagtcaaagattttcaaagattttcagcctcctcccaagagacagtacccatgcatggttagggtctgaatgagcaattgttattcaattgtttgttatgaaatatgacatgtggcttttgggtttcttgctactctcttatgcctcccctcagtcagtgggaagcagcccaaactggaattgaagctgtcaacacaaacctgaaaatgttcagaacttgataactatagtataattataaatcgcacagggccctggtagttaaatcacttcacacttgactttatttgcctgtctgtagaataaagagcaggaaagagtcaaacaagatatggtttgagtcagagcactgatactttttgtagctgtgtaactgtggggaggtcagtcaatgcctctcagaatgaatttcctcacctgcaaaataataataataatgacaataataataatgatagaaatgtactactttgatgcactgatgtattacagaaagaaaaaaaggcaaattttgtctttaaactctcagtttaaatcagtaaactagataccttttttttttttttttgagacaacatgtccctctattgcccaggccagagtgcaatggcatgatcataactcaatgcagccttgatctcctgggctcaggggattctcctgtgtcagcctccccagtagctgggattacaggtgcacatcatcatgaccagttaatttttaaattttctgtagaggcgagatctcactatgttgctcaggttggtcttgaactgctggcctcaagcaatcctactaccttggcctcccaaagtgcttggattacagctgcaagtcaccgtgcctggctgaactagagtgcttctatctaatcctataggaatcccttatttcttattgctgcaggatgaaaattaaacacagattttaattgtgtggattgaagaattatatcagaagttgaaatcacatcctcaccaagtcttatatgtgaaagttagggcattggttgggaaggagaggaaccctgatacttcgaatggggatatctgggtagcctcagatgaaactgagtcactctgagcatcctttctgaatgaatgtatcttcccctctcatggtcgaggacactagttttctctttcttataataacaggggagttatcttgaaatgggcagtatattctcctcaatactcaccttgtttatttatttatttatttatttttgaggtggagtctctgtcacctaggctggagtgcagtggtgcaatttcagctcactgcaacctccctcccaggttcaagcgattctcctgcttcagcctccgagtagctgggattacaggtacctgacaccatgcccagataatttttgtatttttagtagagacagggtttcaccatgttggccaagcttgtctcgaactcctgacctcaagtgatctgcctatttcagcctcccaaagtgctgggattacagatgtgagccaacatgcccaacctcaccccatttattattttctgtctacagatccctaattagagtcagatcgcagcatattttgggtgacaagtacaagtatgatcttggagataatagcatatactccaaaataattgcaatgcttcttgtattttgcataggctgaaaccaaagttaatagaaatggtaatataggctgagcacagtggctcatgcctgtaatcctagcgctttgggagaccaaggcgggaggttcacctgaggtcaggagtttgagaccagcctggctaatatggtgaaacctcgtctctactaaaaatacaaaaattagctggacgtagtggcacgtgcctgtaatctcagctaccagggaggctgaggcaggagaattgctggaacctgggcggtggaggctgcagtgagccgaaatcccaccactgcattccaacctgggcaacagactaagactccatctcaaaaacaaaaacaaacaaacaaaaaaagaaatgataatatattataagggtgttagatcaaggagaatagaatataatattagattgggctgaatttgtagatcgtggtatacttaaccagaaattctggattgagtatgttagctcaggcagctttaaatggctctaagaattgagataggtgttgagagaaacttggtctcaagagtgactttaaagtcaatgaacttgagatgccacaacttcatcagcattgttcagaggaaggaatccagaagtttggagagataggaatgttggagtgggtttattgtgtgcaaccctctctgtattgcctcacccactagatcttctatgagtgctcatcatctctcttcatgaaggtcatgaagagaggtctacattaagaacttttgggcttggccaatggaaggttgagagaagagcaaggtcagattatcgtgcctggccatgtgataacagtggttgtattcctctgccagaaaccatgtcctcctgctggaggctctcttttacccctatacagtcagtctcagtttcagaaacttgtccctctcactgcacctttccacctagggatgatgatggcttatccttactgtaagccatagagtgcttcaacatcttgtaggtttccttcacactgccctcaactttgtaaaaagtccctccattggccaggcacagtggttcacacctgtaatcccagcactttgggaggccgaggcgggtggatcatgaggtcaggagatcgaggccattcttgctaacacggtgaaaccctgtctgtactaaaaatacaaaaaactagcctggtgtggtggtgggcacctgtagctccagctacttggtaggctgaggcaggagaatggcatgaacccgggaggcagagcttgcagggagccgagatcgcaccactaaactccagcctgggtgacagagcaagactccatcacaaaaaaaaaaaaaagaaagaaaaaaaaagaaaaaaaaacccctctattaagcactcatattttcctgctgggattctgatgcacaaagtctatcaaatgaatgcatcataatttgtttaaccaatatcttggtgcacattttggtttcccgttttccattatgtaaacagttctttgatgaatctagatgattttgcacactgtcatgtacatcgtaggagacattactagaagtggagttaactgagtccaagagtatgttcttttgtaatttagacaaaagcgttcacattactctcctctgaagctgtaccaatttacagttccaagaaccgtaactgagagtaaggattgctctgggaggctgaggcaggagtggataccagcctgggccacatagcgagacaccacctctacaaaaatatttaaaattttttctactactagggtgtagtaccctagtactgcctgtggtcccagctgcttaggaggctgaggtgggaggattgcctgagccagggggtcaaggctacagtgaattatgattgcaccactgcattccagcctgggtgacagagcaagacattgtctcaaaaaaaacaaaaaaacccaccccaaacaaccaacaaaacaagaggccatgttttcacacccagtgatcttaatagctcaagttttgctttagagactgtggttttaacatctgctatagtcctgatgctgaagaatcatggagtcaaaggtttcagcctctttccaagggggagagcacatggacaattaccatctcatgcaggcatttggttttatggactcacatgcttgttacaaaaccagacacagctttagggcttgttattaccttcccccaacccatccttggtagaagacagtcaacaaatgatatctaagctgccaacacatattggaaaatgtttgaaacttgagatctgtggtttattatgaaacacgcagtgccctggagtttgaatttcttcccggttggtcttagtaccctgtctacagattgaggggaaagggcaggaaggggagtaagtgtagttaagagcatagccttggccaggtgcggtgtctcacgcctgtaatcccagcacattgggaggccgaggttggtggatcgcttgaggtcacgagttcaagaccagcctggtcaacatggtgaaacccccatctctactaaaaatacaaaagttagccaggtgtggtggtgggtgcctataatcccagctactcaggaggttgaggcaggagagtcacttgaacccgggaggcagaggtttcagtgagccgagattgtgccactgcattccagcctgggtgacagagtgagactgtctcaaaaaaaaaaaaaaaaaaaaaagagtcaaacagatctgactactacatctgtgatctgtgctaggtcctttcagtggttgaaccttaatggttgtgactctctgtttgctcatatgtaaaatgtggatgatcatagaacctttatcacagatttgtgaagactgcatagcacactccatgaaaagttctccttagcacagcatcaggcacagggaagctcaacgccttgaaggtgctgtttttatttctaggtccctaagatcttcctcgtcctccttatggctcccccctttattctccatatttgttccttccttgaaagtcaagggtgcaggaagaagatgatatcctggaggccaagcccacacaattaggacatgtagtggacatttacctgttcttagatccactgctgctcttcctctgcttgtctatcacaaggggctgacacctgcacactaattctgtcttgagggagactgtgtaggggaacatggccatttgagttcattaggaaagggttttgaggtcaggacatgggtatttggtgtacatgggagtttggtggcctctattgtaggaggctttggaaatgtgtattgttgggaggtcctgagggaggaagtttgggatgaacatggagattctaggctgtggaggaagatgtaacatggctattggaggattctgggaccttaccttggtaccttggtaatgaggacatcttcagctttatttttatgtatttacttttttttgagatggagtctcactctgtcacccaggctcgagtgcagtggcgtgatctcaaaatactaaaaattagctggttgtgttggtgggcacctgtaatcccagctacttgggaagctgaggcaggagaatcgcttgaacctgggaggcagtggttgcagtgagctgagatcatgtggctgcacctcagcctgggtgacagagtgagactctgtctcaaaaaaaaaaaaatgttcatgcctcagctgctcagccagtagtcattcttttctcagtagctgttttctcctcagctttgtggagtctttccctcagcctgtgcagctctgtattcagccaatgatttgaggccactgtaagcagctctttccctttggagctctttttgtaagcaaaagctcagtttcttacgtaagaaaacccaattccccttgaggaagagaaagagctggagtcctttaaaattaactgcctgtttttctgtggctagggagccttatctctccctttgccaggcattgtgaagactctgtttctctagctgtgcagctgcaaggtcactagacagataatctcaagtcgtaaaatatgccgttccttgaaaagtaagaaatgatgtaatgcatgtctcaactggataagtgtctttgtttctcgattctgttttatgcttccccctgcacagatctcctcctgcaccagaagtgcttaaaaggtaactggactctttgtttggggctcagtcattttggatgttgatctgactgggccggtgcacctaaataataataagaaatcctcctcaacccctcagtctctctgattcctaaattatctcactgcaaaggcaagataattgcttgagcccaggagtctgagaccaacctgggcgacatagtgagatcctgtctctacaaaagattaaaaaaattagccgggcattgtggcgcatgcctgtggtcccagctactcgggaggctgaggtggaaggattgcttgagcccaagaggtcctggctatggtgagctatgatcacaccactgccttccagcctgagtgacagagcaagaccttgtctcaaaaaaaaaaaaaaaaaaattgggctgggcatgatggctcaggcctgtaatcccagcactttgggaggctgaggtgggtggatcacctaaggtcaggagttcaagaccagcctgaccaatgtggtgaaaccctgtctctactgaaaaatacaaaaattagccaggtgtggttgtgtgcacctgtagtcccagctactcgggaggctgagacaggggcctaggattaaataaggagttttggcaaaactaggctggaactccaaaacctgctacgtaagtactcacgagggttgctagttattagtattattactttgttgttatttttaggagtggagcaggttgtatttgtatcttacatcaccggctctggtcagatttcaattaatgtcacagataggatttaaacatttcttttattatttttaagattttaggccaggcacggtggctcccagcactttgggaggctgaggggggtggatcaccagaggtcaggggttcgagaccagcctggccaacatagtgaaactccgtctctactaaaaatacaaaaaaaattagctgggcatggtggcacgtgcctgtaaccccagctattcgggaggctgaggccaggagtttgagactagcctgggcaaatagtgagaacttgtctctaccaaaacaaaacaaaacaaccaacaacattaggccaggcgtggtggctcacacctgtaatcccagtactttggggggccgaggcaggcagtggattgcctgaggtcaggagtttgagaccagcctgggcaacatagtgaaaccccgtctctactaaaagtacaaaaattagctgggcatggtggtggggcaccaggaatctcaggacttgggaggctgaggcaggagaatcgcttgaacctgggaggtggaggttgcagtgagccatgatctggccattgcactcctgcctgggtgacgaaagtgaaattccatctcaaaaaaaaaaaagttagctggatgctggatgtggtggcatgtgcctatagtcagccactcagaagactgaggtgggaggatcacttgagtctaggagttcaaggctgcagggagccgtgatcataccactgcactccagcctgggcaacacagcagactctgtctcaataaaaaaaaaaaaaaaaagcgcagaagaatattagtttatggagagtattatttaatctttagaaattttctgtacaaaacaaacaatggaaaataagaaatgcattactctataataaaatatagccttttctctctcacatatatatgaatggataaaaacagtcataacttcctacacatttaatcctctatactagcttccatacccatttaccactccctcaaagacaaacataccaaaaagatgctaagtaaatgaacaaaatacttggtattcttaactatctaaagtattgtacttaacaggtattttcttggctgactggttctccatacccaacaaacacagtgatgtcagctctcaccactcacattaaacaatatagccattgctgtaaagtacaaaagagaaatgcagtacaaattgaaaaggaggaaataaaacttttattcatcgttgatattatcagatacataaaatcccaaggagacaaaagctactactaatgagattagaaggatcccagaaacagacacagacatgcacacacacctccccacagacacagatacacactcacaacacactcagaagtacattttattttattttgagacagtctcgctgtgtcacccaggctggagtgcagtggctccatctcagctcactgcaacctccgcctcccgggttcaagcgattctcctgcctcagcctccccagtaggtgggattacagatgtgcaccaccatgcccggctaattttttgtatttttagtagagatggagtttcaccatgttggccaggctggttttgaactcctgacctcaagtgatccactcactttggcttcacaaagtgctaggattacaggcgtgagccaccacgcccagccagaagtatcttttaaacaggatttttaaaagtgagagttgaccctttccataatctggagttgggatgggcattagtggtttggagaggaaagagcaggtgtgttgtggctgggaggcgattcctttcagcaccttgggtgatgtctgaggccatacccactttctgtgctagttttgggattatgatgattaacccacactccctttgttcctcccatgtaagctggattcttgggcattcaaccaatattaaacccttcctctgaaaaattcctggattgacgagaccacactggacccattttcattccctgtcgtgatcaataggtatcaaaagaaatgatagcttcttagaatagaaatttgcagccactggggaatgtagttcttaatgtgaatacagaagaatctcattataaaattctgtatggctctgaatttaagattttgttaatttttattttttttgagacatggtttctctctgtcactcaggctggagtgcagtggcacaatctcggctcactgcagcctctgcttcccaggctgaagcgatcctcccacctcatcctcccacctcatcctcctgagtagctgggaccataggcgcacacttccacgcccggctaatttttttgtgtttctgtattttgccaagttgcccagctagtcttgaacttctgagctcaagcgatctatccactttggcctctcaaagtgttgggattacaggtgtgagccactgtgcacggccaggatttaagattttaggggatattgaaagcctttgattataataccattgaaaacacaaaatacttaaagataaaattaacaaaagttatgcaatagtgtaactacaaatcattgatgagagagattaaatatctaaataaagagatatatcatggccacgaattagaagacttaatattgttaagatgtcagttcttctgaaattgatcaatagattatttgtaatctcaatcaaaatttcagcaggctgtctttgttttggtataagttaataacatgattttaaaattctaagctgtggctgggcaaggtatctcacgcctgtaatcccagcactttgggaggctggggcgggcggttcaccttaggtcaggagcttgagaccagcttggccaacatggcaaaaccctgtttctactaaaaatacaaaaatgagctgggcatggtgttgggcacttgtaatcccagctactcgggaggctgaggcaggagaatcacttgaacccaggaggcagaggttacagtgagccgagttcgtgccactgcactccagcctgggtgacagagagagactctgcctcaaaaaaaaaaaaaattctaagatgtatatcttttacaactaccagtcaaagtaattataaaagagtaacaaattcagagggctcaccttattttaccataaagtagtgtaggcatatactgatcaattaaatagaaaagaaggtctagaaacagacacttatatgatcaatggatttttgattaagatgccaaagctattcaatgggagaaaggaaagtcttttaatgaaagtgttggaataactgaatttccttaaggaaaaaatatgcttttgctcttatttcactctatatttaaaaattaactcataatgactcagacttaaaagtaaaagctataactgaattcttcaaaagaaagcataggagaaaatctttatgaacttggggtagacaaagatttttaaaatgaaaagattgatcatagttctttatttggaaattaaaataaaaatgccataagcaatgacacaaaaaatggcatacctagcattacatttggcttacatttagtgtaagatctatacagtaaaatccgctaaatattgctgtgtcatgttgaggaattttttccttccttcccttcctccctccctccctccctctttcttttcttttccttttttattttctttcctcttttctctctctctttctttctttctttctttctttctttctttctttctttctttttcttcctccctcccttccttccttcctttctccctcctttcctctctccctcccttttattttccttccttccttccttccttctccctctcttttttttttttttaagacagagtctccctctgtcatttaggctggagtgcagtggcacgatcacagctcactgcagccttgtcctcccaggctcaagccatcctcccaccttagccttccaagtagctgggactacaggtgcacatcaccatgcccagccaatttttgtattttttgtaaagacagggtttcaccattttgccaaggctggtcttgaactcctgagctcaagcggtcctgcctgccttggcctcccaaagtgctgggattacaggtgtgagccaccgcatctggccaatcttttctttttctttcataaaagttgtactatttatgaagtacatgtgatattttgacacatagacacaatgtgtaataatcgaataaaagaaattcggatatccataacttcaggcatttatcatttctttgtattaggcacattccaattccactctcagttattttgaaatatactaaaaatcattgttaactacattcaccctattgtgctaccaaacactagatcttattctttccatataactgtatttttgtacccattaaccatctcctttttatcctcccttctccactaccctttttagcttctgctaaccatcattatacctctacctccatgagttcaattttttttggctctcccataggagtgagaacatgtggcctttgtcttcctgtgcctggcttgtttcacttaacataatgtccttcagttgcaactgtgttgtaaatgcaggatctcattcatttttatgactgaatagtactcctttttgtgaatgtaccacattttctttatccattcatctgttgatggacagtcaggttatttccaaatcttggctactgtgaatagtgctgcagtaaacatgggagtgtggatatatcttggatatactgatttcttttctttggatatatacagtgggattgctggatcatagggtcattttatttttagtgttttggggaacctccaaactgttttccatagtggttgtactgatttagatttccaccaagagatatgtatgagagttcccttttctccacattcttgccagcatttgttattgcctgtcttttggataaaaaccatttgaactagggtgagatgacatctcattgtagttttgatttgcatttgtctgatgataattatgttgagcactgatatggtttggatctgtgtccccaccaaatctcatgttgaattgtagctcccagtgttggaggtggggtctgctggagggtggttggatttctcatgaatggtttcatactgtcctcttggtgctgttcttgtgatagtgagtgagttctcatgagatttggttatttaaaagcgtacagcacctccccgctcactctctcttgctcctgcttccgccatctaagatgccttactccctctttgctttctgccatgattggcagtttcttgaggcctctccagaagcagaagctgctatgcttcctatacagcctacaaaactgtaagccaattaaaactcttttctttataaattacccagtctcaggtatttctctgtagcagcatgagaacggattaatacaagtctcaggtatttcttttcttttttttttgagatggagtctcactctgttgcccaggagtgcagtggtgtgatctcggctcactacaacctccgcctcccaggttcaagcaattctcatgcctcagcctcccaagtagctgggactacaggcgcccaacaccacgcctggctaattcttttgtatttttagtagagacagggtttcaccatgttggccaggctggtttcgaactcctgacctcaggcgatctgcccgctttggcctcccacagtgctggggttacaggcatgagccaccgtgccatcaggtatttctttatagcagtgtgagaacggattaatactagcaccttttcatatacctgtttgccatttgtatgtcttcttttgagaaatgtctattcaaatcttttactcatttttaaattggattattagatttttttcctattgagttgtttgagctccttattttttttgtcaattattctttgtcagatggaaaacttgcagatatttattttctcccactctgtaggttgtctcttcactttgttgattgtttcctttgctgtgcagaagcgttttaacttgatgtgatcccatttgtctatttttgctttggttgcctgtgcttgttgggtattactcgagaaatctttacccagtgcaatgtcctggagagctttctcagtgttttctttagtagtttcatgtttgaggtcatagatttaagtctatgatccattttgatttgatttttgcatatgtcaaaaaataggggtctagtttcattcttctgcatatagatgtccaattttcttggcatcatttattgaagggactattatttccccaatgtatgaatgttcttggcacctttgtagaaaatgagttcactgtagatgtatgaagttgtttttgggctctttattatgttccatcggtctacgtaacttgttatgctagtaccttgttgttttggttactatagctctataatacgatttgaagtcagataatgggattcctccaattttgttctttttgcttaagatagctttggctactctagatcttttgtggttctgtttaaattttagaattgttttttctatttctgtgaagaatgtcattggtattttgataggaattgcattgaatctgcagattgctttgagtagtatgaacattttgacaatattgcttcttctaatccatgaacacagaatatcttttcaatttttggtgtcctcttcaatttcttttatcagtgttttatagttttcattatagagatcctttacttctttggttaattcctaggtatttcattgtattgcagctactgtaaatgagatcacttttgttttgagataaggtcttgctctgtcacgcagagctggagtgcagtgatgtgatcttggctcactgcagcctagacctcctgggctcaagagattctcctactttggcctcccaggtagctgggattacaggcgcacaccaccaggcccagctaatttttaaaatatttgtagtagagatggggttttgacatgttgcccaggctggatttttaaaaatttcttttttaaattgtttgctgttggcagatagaaatgctagtgatttttgtatgttgattttgtatcctgcaactttactgaatttgtttatcagttctaatagtttttttgtggagcctttaggtttttccaaatataggatcatatcatctacaaacaaggataatttgacttctccctttccaatttggatgcgttttttttccttctcttgtctaattgctctagctaggacttctggtactatgtcaaataacagtggtgaaagtgggcatctttgtcatgttccagatcttagaggaagactttcagttattccccattcaatatgatattagctgtgggtctgtcattcatggcttttattatgttgagatatcttcctgctatacctagttttttgagggcttttattatgaatggatgttgaattccatcaaatgctttttcagcatcagttgagatgatcatatggtttttcttcttcattctgttgttatgatgtatcacactgattgatctgaggtgccacctcagttgcaatagaatagagcaccaggtagattgctaaggccctggctcctggacagcatctctattcctccctggggcctggaagaactcaccaccccaaagggaagaacaaaaacctccctcctccctaaactcctggcaactactatcttgtactgtcttcacagtttcatttctccagaatgtcatatagttggaatcatatagtatgtggccttttcagactggcttctttcacttagctacatacatttcaggttcttccatgtccttctgtggcctgatttctttttattgccaaatcatatttcttttctttctttctttcttttttttggcttttttttttttttttgagacaaaatctcactgtgtcacccaggctggaatgcagtggctccatctcagctcactgcaacctccgcctcatgggttcaggcaattctcccacctcagcctcccaagtagctgcaactgcaggtgcatgccaccgtgcccagcttatttttgtatttttagtagagatgggtttcaccatgttggccaggctggtctcaaaatcctgacctcaagtgatctgcccgcctcggcctccgatagtgctgtaattacaggtgtgagccatcatgccctgccatatttcattgtatgaacatatcacagttcatttatccattcacttgttgaagaacatcttggttgcttacaagatttggcaattatgaataaagctgctataaacatctgtgcagaggtttttgtgtgactgtatgttttcaactcatttgggttaataccgaagagcatgattgctgtagcacatggtaagaatatgtttagctttgcaagaaaccgccaatttgtcttccaaagtagctgtgccattttgcattcccaccatcaatgaatgacagttcctgttgagccacctccttgtcagcatttgatgttgtcagctttggattttagccattctaataggtgagtagtggtacatcattattgtttcaatttgaaatggctactgacatatgatatggagcatctttccttatgcttatttgctatgtgtatattttctttggtgaggtgtctgctcagatcgtttgcccattctttaattgggttgttttctactgttgagttttaacagttctttgtgtattttgaatgtaagtcccttatcaggtatgtcccctgcaaatatgttctcctagtctgtagcttatattgtcattctcttgacaattcttttgcagagcagaagcttttaattttaatgacacagaacttatcaattgcttctttcaaggattgtgcttttggtgttgtatctaataagtcatcaccaaacttaaggtcatctagattttctcctacgttatcttctagaagttttgtactcactattcatttaggtctacaataaacttggagttaattttcgtgaaagccgtaagggagcttctaagggggacacacactaacttctttgagagtgggcagtgattgtgaaactctcagctgggtcttacaacagaccccagatccatcaggagagcccagccttcagaacccatagtggaatatgtttcatgcatacacggaggagaatatgcagtcatatgctcacatgcatgtctgaacatgatcacacacatgaatatggctatgtcctgatccagagttctctcattctctgtaagtgattctttccttcaacttcttcattaagggatatattgacagaatgtcattaaaattaaaaacttctgctctgcaaaaaattgttaatggactgactctgtatgtccattcatgtctcgttgtgtccctggactgactctgaatgggctacagtggccttatctggtagcaagcacagattacacccgggtattcaaagcatgttgagtaggtgagagtgtgggcatgtgtgcagtgaaggcaggacagccacccgccaggtctctggaaaactccccaggacagggatgttcaggccatgtgatgctatactaagctgttttacgtgaggaatgggtggtttttaagaatgtgtctagagggctatgggcacagatctgtgttcaaagattttctgggcacttatgttttgtgagacatcagatagagccaactttctaagcctcagctttgtcacgtgtaaaatgggcatgaacgcttttccccttcgcagaggtttgtggcaattaagtgaggtgagcgtgcaatagtttttgaacaaaggtgacacgggggtacgtgctcaggaaataagagctgctattattactactcttcatagcataatgtaaggtttcccttcctctcatcccagctcggaagcaccttatcaaggtgaactgagccgcttctgtttcttctcttccctctagccaccacgccccttcctttcccgcatcttccccccattcttatacccgcctcttccgcgaaccccgccctgaccccgcctttccctggccccgcccaccagacctgcaccggcacagccctcgctcagcggggcaggaagctcatggtgtagtttcgtgggatcgtggcaaagaccacgtgtttgggggacacgtcaatgtccttaggtgactgggaggacttgaggcggaagttctgcatgacggtggtgaagaagagaaagagctccattctggccaggccttctccgaaacagttccgctttcctgaggaggagaggcgggaggggtggaggtgaagcccactctcagtgcagcctcgccccagtaccgacctccagctgcggctctcccagggaggaggggtggaatattatggcctgagagagtttcagaggaggctctgatcctccctgagcctcagtttctttctacaagagatgtaacaatggtgaaccaatattgatatattattactaacaaagtccatagtttacactagggtttactctgtgttatacagttctatgggttttgaaaaaggcataatgtcacacatccatcatagatggggtgatccatgccaggtgtagcaatgggaggtttagatgtccttcttgccagatacacttgcaaatatgactgctgtgccgtcatctcctttttagggatctgaggaatctgctgtgtgaccctagagaaatacatctacggggaaagatgtttcctttccttttacctgggtgcaggtactgggtgcttggtagttaaggaagtatcagctgctggctcaagggtagattctaacaggaacttccaagctggagaaataccaggctacaccgcagagaggggaggtgggtgagggaggcgcctgctggtgtgagcagtggcctggcagcaaacagtggtctcttaccgatggaaaagggcacaaaagcatcactcttcttaaactgccccttgtcatccaggaaatgctggggattgaagtcctgagggttggagaagaagctggggtctctcagcacggagcccagcatagggaacacttcggtgccctggtagggaggaggaagttgtgtgtgatgaggagggtcgggggattggtgaaagtacacaggggctggagggggaactagtgtgccccaggtaaggggaagtggcaggcatggaggagttggggtcctgtgaaggaggagctttggggaatagaaggttcacatctctgaaacaggaagtttgggagacatggggtccatgtcttgctacgcaggttgtttgggggacctgaaatttgtgtccctaagacaaaaggcctaatggaaagggggcttctgtttcttaagataggaagttttggaacttgagtttgattctcccgacacaaagagtctggggagatgcaggactcaggagtgtctaagtggaaaggtggaatggatgtggtggttggggaagtcctttttgactgattgagggagtgggacagtgagtagaaagcttctaatgggggcaggattctggggacacagagaagggctggaagtccccgtagtctagggggtggggaggatagcaccttagggaggaaaaaatcccgaaacttggtgtcctttttaaccctgcgggccaaactcatggggatcacgtctccaaatctttggatctcgtggatcactgcctccatgtagggcatcttggtccggtcctcaaacttgggctgccggttcttgccgatcactctgtcaatctcctcatggaccttggctgggggaggagggggaatgtgtttaggtatctgggagtctcagagcaggaaatgatagtctgaataggtaaaacggggtggatgatacggctccccctatgagacggaggtagagcattcataacagaacagacatcggccattcgcattgttggagtaggatcctgttaaccaggttgtgccagaatcacaggggaggcacagggaggaacttaggagatgacccgggggaaggggcagcgggcactcagtgggcttgggacagaagtgactgaccaatcagtgcagacattttcaatattttaatagctaatgagactcagctgatgcctaccagctgaatgttgccctgtctctggacagcaaggcacgtctcagggtcctgggatctgggacaggtagggacattgcaccagtcgaaggggaattttgagggtctggggccctccacttccgtccccctccagccttaccctccacctctgggtgcttcatgagcagcaagaagccatagcgcagggtggtgctgaccgtctcggtgcctgcaatgaagaggttcaacgtgctcatcatcaggttcttcaagtagaactccgtgttggggttcttctcctcctgcagggagagggggctttaggccaacctcactcctcttgccctcagggcccttctagggcttttcctttggatctacctctctttggtccagaccaaaggtggaaagagggaccctagatctaccagactcgctctaggttccagcccttgccctggctgctggctttgcccaaaatgctctttcttctcaccttctttacgttgctgaccatctgtcctttaattatcaacttagctgtcagttttttttttcttacactgacttggtcttgctaagttgcacaggctggactcgaactcctgggctcaagcaatcctccacccttagcctcctgagtagctggaactgcacacgcgcatgaccatgcaggctcacttactttttaaacaattaattaattttttttgagacagggtctcattctgtcacccaggctggagtgcagtgccgtgatcttggctcattgcaacctctgccccccttcgcgccaccacgtgcagctaatttttggatttttagtagagacagggtttgaccatgttggccaggctggtcttgaactcctgacctcaggtgatccacctgcctcggcctcccaaagtgctgggattacaggctgttagccacggcgcccagccaattgtgaggattattatgatgagggctaatttgaacgggtctgtgtcgtctgcccgccccactcccagtctgatttccctctgcctggctttgcacctccccgcactggctgctggggtgtacctcctgcatgtggatgagaaaggagtcgatgaagtcctgtggggaattgggatccagcgtgcgctggttgtgctccaccttcttggctatgaagtcctccagcccttgcagcaacttaaaggcctgttgctgtggtcctggcaggtgtttcatcaccgaagagaacatctcatagagctggggttgcagagagaggatgggaagggaaggacagctgtcacggggcaggagctgatgggaatgggatttgtttcatagcaaggaaggaactgagttaaaggcatctgtctcattgtttaggtatttcagtggggtcggataggaacttatatctaagttttcaggaaggttaggtaccagggccacggtctagtaatttaggtgagaagaactgaggcatatatccaggtttcaggtatgcaaatgaggctggattggagcacacatctaggtgttcagatattcaagtgaagttgagttggaagacacctgtccaggtgtttagctcttcaggtggggctggtatgaggtgagtgtcacctgtctaggtatttaggcattcaagtaggcttggttggagacagctgtccagatacttactgggtctggattgggggcttttgttcaggtgttcaggtattaaagtggggctggtgaagatgttgaagtgcaggggatacctgttgaggtgtttacctatccaagtgcgatgcacagggagcacctctgtaaggtgtgtgattggaaagggttggggaacacttatttgtgtgtcagggaacaatctgtctagatatttgtgtgtttaaggtgttggttagggcagctgtccatgttttcaggcatttaagtgggtgaagtagagggcgcttggccagatattccagtgggctaatctgggacatttgtgtagatgtgaaatgattatgatgggctggattttgcagcaccaggtgttcaggcatgcaggaggcgggttgacgcagtcatttgtccaggtgttaaaatattcagaagaactgggtagggagcatctgttagaaattacggtaagttggggatgggaacacgtgcccaggtgagagagctgagctgagggtatgtatcctaccagcaggctctgttttggggagcatctgttgagctatccaggtgtccttggagacaggcttctggtgcaactgtccagttgtccaatatcgggggctgattttgaggggacactgtctggagcggggtgggagtttggggcacctgtctccaggtaggggagcagttggcaggttgtggtaggggcgtcacgggccgggctgcagccagttacctgccccgtggaggttgacgtgaactggaagattcctagcatcatgctcagcagtgacaggaactctttgtcctcatagtcaaagcggtccccaaagacaatggagctgatgacattggagactgtgcggctcaggaagaaggtgggatcgatattggcgcctgcgggtgtggagggagaagggggttggggagagagtcaactcagaggtctgaggagaatcagaattccaggaggcagggccttgttgagccaaattcccagcgccagactccagggctggaagtgcgggcgcctttccccacctagtccccatccgcaggcagaacgcgcgcgggttcctcgtcctgggtgttttccttctcctgcccccgcactcggggaaccttactcaccgtgcgtgctccggatggcctcgatgaggaagcccgactcctcctggatgcgctcctcgatgcctcgcttgcccaccccgaagtccctcagggtggcgatggcaaagcgcaggagctgcttggcgcgctccccgttgctgaacgccacgcctggggaggtcaaggcgggggtggagagaggtcagggggcggcggtggcaggagcggaccagttccaaggggctccccaagggtggagcagaggggtagtggggtgggagagagatggattcagtgccagtgcccaggacaggtgcaaactcagtcagagaaacacgagggagagagagagagagagagagagagagagagagagagagagagagagagagagagagagagagaccgggtagaaagaataagagaatcagaagagaaacagaaaggccagatagagatgcgcagagaaacagagggataaggggatactccatggaggaagggtaggaagtggggagagaaagagagagatggaggaagaggatggagggaggggaagtgagatatggggagatctgggaggaggaaataaaaatggtgaaacattcttaagctgagctggagaagagagaaaaatactgagacagaaacagagagggtctggaaggaagagagactgttaccaggagatggaggctggagatgtggaagtaagaatagcatgaaatcctaagggagaggaaaaagtgagagagggaagtggagagaggagaaacatggagaagcacagaagctgagagcaacaaaaagacaaatgaagacagaggaccagggctggaaaacagaaacccaggatgtcctcagagatggagagagaggggaaagaggagactccagtgagagagaataaggaggtggggcagagagaggcagggaggaatcacgacagggacgctggagacaggtgagggatacacatggagaggccacagtgaagggagatggggagataagaccagaccgggggttctgccatagcctccagtgggcaggagagtcagggagaaggctggcaacactgagaccatcgtgtccgcctggccaccttccccatcttgggcaccccctcaccatagcctttgaagacccagtcgaaggtggcttgctcgcctcgcccgctgaactcctcagcctggtccaccagagcctccctgacggcatcatgtccacacagcaccacgacccgccggggccccaagtgaatggtgaacacggggccatagcactcactgaactgatggaggcgagtgggagtggttagagggagcagcccccactctgaatggggcccagcaccgagatgtcaagtactgggatccttcacccccaggttctcacagtcagggagctggacatcccaagatcctgtctttcctggctaggacccggatgctgaaactccaaaactccctttcctaagactctggtccacactggtcaatcccctgccacaaagccccagccaactaggcagcccccaccctgtgccacccatcttcctgccttgggacaccttcatgatggagtcacatatgtgctctgtgttcagctggaggtagtttccaatgaagggcagtggggtgggtcccggaggcagcttccccctgctcttcctctgctgccagacagacatcaagaccatcacagtcaggcaggccagcaaggccaccagaagcagccctgaggccagcatggtggtagtgagatgacagatggtgatgggtggggtggtttgcctttatactgcctgaaaaagagggatggactttggctaattacataatcaccttatttcacctcccaactacacgccccaccatgaatgccacctagcttgggacacagccagcaagggaggataaggggaccccagggcagctgaacagagagggggcctccagactaaatctgtggtacttcaggaggggtgccgcagggctgtggatttaggagggggcaaccgataaactgtagaactgaagagtttggaatatttgcataggggagcacttgggctttggatttggggtctgagagtgagaatgcaccccaaagttgtggatttgggcattccaagggagaggaatccaaaggtctgggttttattagggtgagatggaagtgtggctgtgcatctggaggtcttctgttgcggaggatgcagggttaagggtctcaggaggggggactccaggcatatggacttgaaagtctcggggctaggaagacccagggctgtgggtgtggagtttctgggaggaggagtgtgtagcaagccagcaggtgctcccagaaagcccagcagcccagcaatgggcccaggggctgacttgattttgcttttgcccagagctatctcttgatgcccagaatcctcattggaacctcagagtgaggccaggatgggtgccatggaacctccactgcccatctctggttgggaaaggggtggaagaccagggccatatttcaggggaactttccccacacctggagaagagtacctggagttagcggttggcagagggattggctaggtctggagaaatagtaataacaacccccaaatggtggaaaaatctcaagtgtcccaagggttgtccgctggtttccaacccagatcctcagggaaacccactagattgattgtatcatccctattaatattatgattgttgtttatgtttctcattttatataaagatctacagaggacagaaaacagacagtgggcaggggacatgtgtgagtggccctgaactcccatctctcctgctctgtgtacttagttcccctttctggatttggttttcctgccagtggaaagggagtgtttgggaagagaagatcacatttgagggtgagttaagtctcctttaagggcgattcctgctttgtcaggggctactactattagcaggcagagggaacagtcgcagaagagattggggtaaactccagtgttaggcacagaggcagatcctggggtgggtgtgagtggagaagggatgagtagccctcctgtccttccttcagggaaattcttccttagtaaacaggacagttaccctttggtgagcatggtcatatatgggaagattaagtctaggtgtgtatgatctggttgaatctttgtaacagtgaggttggttcatcgtgatcatcctcattttgaagatgagcagatctagactccataaaccctcttgagtgaggtcacacagggagtaagtgagggagctgggatgtgaactttctcctcgccccccttcattgactggcctagatcaccctgggagtcaagtgcgggccagccttagcaggaggtgagtgctgagactggcatcagcagtggacacactgatgacattggcgggttctgatatcagcatcaggtatggccagggagggaaaggcatcgtgttggctttgggactgcccccaggtgtatgcgaggatgggaaacaagttggcactgaacttgacaccaggagaatattgaagtcatgtttggtgccaagagggctctgtgtgttgtctcaggtgtcattgagggcataagagtgtcctgcttcaggagggcataagggtggcaccatatagggtctgaggttggtcccagtgggctctgacatgagcatgaggcaggtgctgatattggtcctatgtgggtctgagatgagcctcagccagaccctgagaggggccccagatggccacaggacaggctctggtggttggaccatttagggttgcacctgtcctctgggtcaccaactttggacaagtggaggtgggtgaggttggcacccccaggactgacatcttgctcaaactgttctaggatgctgagctctgagacctgtgtggagggaacaaaggtcagagaacaaggcagagagaggaaagttgtttgttgattttggaggggaagaggtggaaaggaagattagcaccagcttggcagatatcaatccctctaatcctgttcaccagcctgcacctgggcctggctcctccttttccttcttgtttcttaaaaaggtgggagacagaaatctgaggagtttgtttctcagtggggttggcactaagaagtgcactgagtgatcagcaggttgccatgacctggccagggaggggatggggagagacaggttgggagaactctagtatttgtggacatagaggtcaatgaattttggacttgttgattaccctagagcatggagtgagagaatggtgtctgaaatcatgtgggagggacttgtcccagtgggcagtgtcttgggaacaggctttcagagtgagttagtggcgagcccaggaagatccctttcctttgctgggcctcagtttccctttctgaatggatggtgcaatgattaaggcctggattggaatcctaaccttatcctttctttgttgtgtggctttgaacagctgacttcatctctctgagtcttatggagccaagaacagctcctacctctttggctatttaggggagaagtatatgtgttaatgcagatgaggtacatggcagtaagtgctcaatgaatggtagttgttctctttaatctgtaggatgaagcagattgatgagatgttccctaagcacattccttgcttttacattctctagtctaaagctcacaaatcttttcctttgggaaggaggaaagggacagagtctttgggaacctccttcgccatcccttcctcagcacagccaagctttaccccatggagctgtgaataggaaattaatccttcatggcctcctggagtgtggtgctgagttaggcagtatctgcggaaggacaggccagcattagactctcaggttattctggttggccctggagccctgcacaggactttgcccacctgtctgtctatgcttgtcttggatcccatctttctatctttctctttctccttccctgcaagtcagtgttcccctcaatcaccctgtgtgctcgtgcatctttgttttgtgccattttgtccagtgggttctcctggatgcctctgccatgtttatcctcatttatacaactgtgtgtgtgtcattctgggtgcatgcttttagtgtctacgtgcatgtatgtttcagcacgttcatgttgatacatgaatttatgtgtgcaccaggctttgtggtgtgtatgtttgtgcttgataatgggtatccattccaacttatgtctgcacatgcacatgtgtgtgtgtgcctgacagggtgtggcactgtttctcaatgcttgccaatctgtgtctgtctctgcatacagcatgtgtgcacacatgatttaggggtgtctacgatgtgtatttctgtgtagaacaagatgaatgctgcatattcatatttgtgtgtatacattcacaattgggtgactacatataagtatgtggatgtttttttctttgtttttttttttttttgagacagagtcttgctctgtccccacgctggggggcagtggcatggtctcggctggaacctctgcctcccagatttacaccattctcctgcctcagcctgctgagtggctggggctacaggcgcctgccaccatgcctggctaattttttgtatttttagtagagatggggtttcaccatgttagccaggatggtctcgatctcctgacctcgtgatccgcccgcctgggactcccaaggtgctgggattacaggtgtgagccaccgtgcccggccagtatgtggatgttttcatgtgttcattctggtgtgtgtgtgcagacttgtgggccatgttgcatacacgtgaacatgtgatattttcctgtgctcatctgtgtttggattaaaacagtcctatcccagctccatttatctgcttgaaaaaacccccagaactgcaggaagctttttatgagcataatcttaattgaactcctgattgcaagactgaggttagctttatcatctccattttgcaaatgagttagataagttcccccaaagccggtcataagtgacttgcttctgcatttcacagctaatgagtgtagagtcttagtatggtcttgtgtgatggtaaatttttttttttttgagatggagtttcgctcttttgctcttgttgcccaggctcgagtgcaatggtgcgatcttggctcactgcaacctctgcctcctgggttcaagtgattctccagcctcagcctcccgagtagctgggattatagccaccagacgcagctcatttttgtatttttagtagacacggggttcaccatgtttgtcaggctggtttcaaactcctgacctcaggtgatctgcccacttcggcctcccaaagtgctgggattacaggcatgagctaccatgcctggctgtgaatgtaagtttcatgctgttaatcaccactttggactgctaggccccacctgtttttctttatgaaacattagaaaaactgcttgtactctcttgtgtttcttcaaatacttccatgtaaacatgtaacaaaggatttcaaaatgttagaaaaaaaagtcttttaataggagggagacttgaccttctgtagtgtttgcactttttggaagcttaaccaaagacctagttggccagtatacccctcatgccattggcaatgaagcagtgggggagttggggtactagttgttgtggccagagagtgaaatgtctgtgtttcacatttcagattgatgacaaggatttggggggtggggctgtgggaatgttggctgaaaatagagtgaagaaggtcaaagaagagaagacagtcaagattctttttttctgagtgtttggatagctcacatccatggccatgaagttcctccctaccagtaaaatggcaggacttagagttcagagatgggaaagaagttggatagatgatagggatgaacagctttttttttttttttcttttgaggtggagtcttgctctgttgcccaggctggaatgcaatggtgcaatctttttttttttttttttttgagatggagtcttgctctgttgcccaagctggagtggagtgctacaatcttggctcactgcaagctccacctcccgggttcatgccattctcctgcctcagcctctgaagtagctgggactacaggcgcccaccactacgcccggctaattttttgtatttttagtagggactctgtctcaaaaacaagacaaacaaaaacaaacaaacatgatgcaactatatgctgcctataagaaactcattttacctgtaaagatgcatatagactgaaagtacatagatggaaaaagatattccatgtagacaaaaaccaacagcaagcagtagtagctataacttataccagttgaaacagattttaaggccgggcgggaacggtggttcatgcctgtaatcccagcactttgggaggctgaggtgggtggatcataaggtcaggagatcgagaccatcctggccaacacggtgaaaccctgtctctactaaaaatacaaaaattagccgggcgtgcacctgtagtcccagctactggggaggctgtggcaggagaaccactcgaacctgggaggcagaggttgcagtgagcagagatcgtgccactgcattccagcctaggcgacagagcgagactccgtctcaggaaaaaaaaaaaaaaaccattttaaatcaaaaacattaaaaataaaaacaaaacaaagtatgaacccgggggcgggggtggaggttgcagtgagccaagatcacaccagtgcactctagcctgggcaacagagcaagactccatctcaaaaaaaaaaaatattctggcagcatcacatttcttagtcccagaaggagggccatgtgactaggcaaaaaatgacccaggttccatttcatgcacacaccctctggagcacaaatctccttctctctatcccacttagacctgggtttctctcttgtccctgtatctctttgtttcgttgcctttctctttgttcatctccacctccaactttttgtctagttggatttctctgtgagccatgggtgcgtccactctttgggttcctcttgattctcttctcagccgtatgtcactttctcagtctctgtctcactgaaacttttttcctgtcttttattctttctgcttctatctccctctctctgtttctttgaattgtcttttgtctctgtgtcctccttgacatttatctttgactcactgaatctctctctctctcatctcaattttgttttgtttgctttgttttgtttttgagacagtctcgctcttgttgcccaggctggagtgcagtggtgcgatcttggctcactgcaacctccacctcccgggttcaagcagttctcctgcctcagcctcctgagtagctgggattacaggcgcccgccaccatgactggctaattgtgtgtgtgtgtgtgtgtgtgtgtgtgtgtgtgtgcatgtatttttagtagagacagggtttcaccatgttggccaggctgatctcgaactcttgacctcaggtgatccacctgctttggcctcccaaagtgctgggattacaggtgtgagtcactgtgcctgtcctcatctctattttgatctcactctggttctgtttctatgcacctcgattttgtctcaatcttgatttctgtctccatcacataatacctggcataatctgccatgctctgaatttctctgcctcaagtcctctgcaattatttttcctctttagcttgcttctactttttagttcaagttcctccactcctggcttcctatctggaggtggaatggtgaagggagctgttctaagagtatttgctctctcccttcccgtctgagtaggaaaaccagactcaccatcaccacacacatgccaccaccctgaatgggtgttaaatgctggggtgtgaggatcagaatgggatggggaggtgaaatctaagagagtcaaaggagatgggctgagctgagtctctactccaagaaagacattctagcagcagatccaagagacagaacgtggcactgtgtgtgagtcactcagttttcgtagaatttccactgcttctggacacaggatgcctcagctcagccagccaaaccccattcccaaaacttacagataccttgagggattcagtttccaagtctgagaatacagtcgtgtgaaaaggacattgaattttgataaatagtatatgtgggtaggatataatatccaggaagttcatttcaggccaataaggctttgaaaatatttggtgcggaaaaggtagtgaatcactttttagattattaaggaacacaatcactaattgcgctggaggagatgttctcctccagagactggggttcagaggtgatccctacaccttagagttttaaaacacacacacgcacacacaccaacacacaatacagcaaagttctttttttcttttttaaatttgatacagcaaagttctgatacaccaacacaagtaatctttgattattgttatttaacatcttgagtagaaaacaagaactttttgaacaaaacctgttcaattgatttatttctcttgttttctaaatcttcagcttactttccttattaacattctagtgttccattacacagtagggtagctgtagttaacgataatacattgcatatttcaaaatagttagaagagaggattttgaatgttcttaccacaaagaaatgataaatgtctcagtaatggatataataattacccgaatttgattgttatacatcgcatacatgtataaaaacatcacactgtaccccacaaatatgtacaattattatgtcaattaaaaaaatttaataactgtttaattagggttatacttaattaagtaacgaacaaagagttttccttgttgtctatcaagactttctaaaacaacatggtctgccagctgtggtggctcacgcctgtaattccagcactttgggaggctaacgggggggcgggtggtggatcacttgaggccaggagttcgaggccagcatggccaacatggtgaaaccacatctctacaaaaatacaaaaattagctggacatggtggtgtgcgcctgtagttctagctacttgggaggctgaggcatgagaatcgcttgaaccctggaggcagaagttgaaatgagattataccactacactccagcctgggtgacagagtgagaatctgtctcaaaaaataaaacaataaaaaaaaataaaacaacatggtttccctgtttgatagatggggaaacaagtcccagaggttaagtgactttcccagtgaagaaaagacagagctgccacttgtacccagattgtctggatcctaaaatcaatagcctaaaaagataataatttgcctcttacaccccaccaagaaattctgttcaattctgttgagctgagagggaagaacagggagactggaaatatgaagaaaggggaatggccccagaggatttccctgtgtgaattcaatttacctttattcaggtgggagattataggttatataaccacccccaatataaagcaatctcttccccgatgacactcaaacccggaaaacttgaatcccagggtgttcagattttggtataagctgatctcccaggacctacttaggcaggatctggtgcccaggacagaacctgttgacctggcaccatggagctgggaggggctgtcaccatctttctggcactccgcttgtcttgcctgctcatcctcattgcctggaaacgaatggataaggcaggaaagctgcccccaggtcctacaccaattcttttcctggggcacctgctgcaagttcgaactgatgctacgtttcagtctttcatgaaggtgagtctgtctgtctcctttaatagggctaaaagcaactaatcctatagccagattcacatagaaacttatgacttctaaaagatagactctcagaaacacagactttgcaaatcttagaattctgaaattccagaatcctaaaatgttggaaacacacattctcagtgcattgaaataagattttcatgatctcaggactttggaatcacagtacattatatttttaaacacaggattctttgactcagcttgtcttagcactttgagacttggtatcatgaagtcttaagattctagaaatttaacatttcagagagagaagtatgaatcttggaatttatcgaatccaggtcccttattttggagatgcagacagtaactcttgtgggaagggatgagcttttgccgagaatgacagaagccaagacttccgtgcctctttcccagtattccttccaagcccagatttaccttggttccttagtaccatgtttatatccctctaaaatcgccatcctctaaaatcctcaactggcctatgcttggtactccagtcagcccctcctcttgtgttttccttcactccaagctcagggagaaatacagccctgtgttcactgtgtacatgggtcccggccagtggtggttttatgtggacacgaagcagtgaaggaagccttgatagaccaagcggatgagttcagtggccgtggagaactggcttcaataaagcaaaacttccaaggtcatggtaggtagcaacaacaacaaaaacaataaaaccggaaatgactgcaatgcactccctatatgccaggttctttggtaagtagtccacatgacttactgtattgactcccttaggagagctgttaacattatactaatgttgtcaatgaaaaagctaagataggccaggcatggtggctcatgcctgtaatcccagcactttgggaggttgaggcgggcagatcacctgaagtcaggagtttgataccagcctggccaacgtggtgaaaccccgtttctactaaaaatttaaaaaaaaattagctgggcatagtggtgggcacctgtaatcctagctgctcaggaggctgaggcaggagaatcacttgaaccctggaggcggaggttatagtgagctgagattgcaccattgtactccagcttgggcaacaagagtgaaactctgtctcaaaaaaaaaaagaaaaagctaagataaaggttagataatgtcacacagtaagtggtaggataattttattttgagcctatgccatctgactccaaactgttttctgtgttatttctgctcctatttttaatggattagtgagatatatatatatatatatatatatatttttttttttttttttttttgagacagtttcactcttgttacccaggctggagtgcaatggcatgatcttggctcaccacaacctctgcctcctgggtttaagccattctcctgcctcagcctcctgagcagctgggattacaggcatgcgccaccacgcccggctaattttgtattttaagtagagatggggtttctctatgttggtcaagctggtttcgaactcccaacctcaggtgatccacctgcctcagcctcccatagtgctggaattacaggtgtgagccactgagcccgggggattagtgatattctttatgcacccatagccaaccctcataccccttatagctaaccttatttctcatcttcctatacttatacacatacctaacccataggtctctgcctccttcacttaggtagatctctttctctcatgcatccatctctaactgcccacatccttcaattccaaggaggctcaccacattctgcctatcaatctatctatctatctatctatctatctatctatctatctatctatccatctatctttctattaccttttttcttctgtccattgatctatattcatcagaaaatccattcattattctttctataaaaatatctttcactctattatctatacttctgtcaattaactttctatttattcatctagtcatcattccttccattcattaatgctttcatcattcatacatctatcaatctctctatccactctccaactgttattcactcagttatttttttatttatccagttccacctctgcttcctgtaagaaacactctttgatctccccctatcattcctgcactgattcccttttcctccacctgagtctggactttttttttttctttcccgaggatcctgcagagagggaaccttactctcttgattgagtcttgaaggttgaggatggcttcctggacagcagagtctagagctttcataatctttccccatcactgcctaagcacagagttgaacacagcaaggggagggaggcagaagcctgagactgagatcttggcaggtgtagctctggccaatggagaacgatggaggattctccgacgcttctccctgaccatccttcgggacttcgggatgggaaagcagagcattaaggagcgaattcaggaggaggccagctacctactggaggagttccagaagaccaaggtatgagggccacaagggggagggccactaggtgactgggtggttatggagctctcagtcacgagaagatgggccttggcgggagaaagctctggaatggaagaagagggaaaatattaagaatccactgagatttctggcagcttccatattaagagtttacatgatcatgcctgtaatctcagcactttgggaggccaaggcgggcggatcatgaggtcaggagatcaagaccatcctggctaacatggtgaaaccctgtctctactaaaaatacaaaaaaattagctgggtgtggtggcgggcacctgtagtcccagctactcgggaggctgaggcaggagaatggtgtgaacctgggaggtgaagcttgcagtgagcggagattgcaccactgcactccagcctgggcgacagagcgagactccgtctcaaaaaaaaaaaaaaaagagtttacatgagctgggcatggtggcacatgcctgtagtgtcagccgcctgtggggctgaggctggaagttgcttgagcccaggagttcaaggctgcagtgagctatgatcatgccactgcacttcagtatgggagacacagtgagactctatctcttaaaacaacaacaacaaaacaattaacatggaagacccttagagaccacttatctagaaactttcatcagtggatctcagggtgggtctgtgagctctcgatatcctacacagattttggtgacatatgactttgtgactcttcttgaagagagtctcaaatttcattccatttgtatatctgtattgtggtaaaaaaaatacataacataaaatttaccatattcaccattttaagtgtccagttcagtagtgttaagtatattcatgttgtgaaaaaaatcttttgaacttttttatcttgcaaatgtgaaactctatactcatttcattgtgtttttaaaggagttcagttccaccaaaaaataaggtctagaaacactggggtctatagagaaaagacaggctgaaaacaaacaaacaaacaaacaaacaaacaaacagagaaaattagataagaggtagaaatagagacacattttctctacacctgaggctccttgcctggtctctatgggtgattaacaggtctatataaaagcttcaaatgcccatgtaccccagaaattattcataaaattgtgtatttgtgaatatgtgcattattctagagaaattgttcccagatctactgatcttgttttacggaaggtgtaggtgagggcaagggaaggattttgttttgttttgttttgagacagagtcttgctcttgtcacccaggctggagtgcaatggcatgatctcagctcactgcaacctccacctcccagtttcaagcgattctcctgcctcagcctcctgagtagctggtattacaggcacctgccaccatgcccggctaattgttgtatttttagtagagacggggtttcgccatgttggccaggctggtctccaactcctgacctcatgatctgcctgcctcagcctcccaaagtgctgggattacaggcgtgagccaccgcgcccagcccggaaggattttttaaattgcctaaatggaattatcggtagaactagacagaattcaggaacttttataatgtgtcccttatcccacttttctccaaatatgagtctctaacatcaacacatttaagtaataataataaaaaataatgattaagctcaactagcttttcttgagtgcttactgtatgccaggcattgtgctaattattttatatggataatgatactgaatcctcatgactcttcaccctttagaacttcaggacgtggaaacacaaaatccccgactttgggaggtcatttaacttaatcttctacttggtgtctgcggcctgtggctgctgtaacaaattaccaggaacttagtcatctaaaacaacacaaatgtattatccttctgttctgaatttcagaagttcaaataggctttcactagctgacaccaacggaccatctgattctctgccttttcggggtgttaaagctgtactccttgtaatcctgggttcacgactctgtcctccatcttcaaagccagcagcgtagcttcttcaagcctctgtttgcttctggcatcacatcttttattctttttcattattttggagagtcttcctctcttgcccacgctgtggtgcagtggcgtgatgtcagctcatgcaacctctgccttctgggttcaagtgattctcctgcctcagcctcctgagtagctgggattacaggcatgtgccaccacacccagctgattttgtatttttagtagagacagggtttcaccatgttggctaggctggtctcaaactcctgacctcaggtaatccaccctccttggcctcccaaaatgctggaattacaggtatgagccactgcgcctagcctcacatcttttttttcaaactccgattctcccgcctctcttttatacagacacacaatattatattgaaggccaatcttgacaacccaggctaatctcttcatcccaagattcttaatttactggcattttcaaagtctctcttgtgtttttgttacccttgtatacatagccttccaggcattaggttttagagacttggaggtggttatctttgatggacattatcgagccaactgccctgccaaagttaaatagaatccgtctccaatcacttctgatctggtccatttgggtaactttagtaatgaggaactcactacttgcttaaggaaaattcccagttttggcccctctccttaataatgcaattcaaaacaagccaaaggatttctcctggtgcagatgagagatgctaacacacttccactcaaatgtttctagtgtcacctccattgtctgagttgtctttcactggtctaaataatcaggccgggtgcagtggctcacgcctgtaatcccaacactttgggaggcagagatgggcaaatcgcttgaggccaggacttcgagaccagcctggccaatatggtgaaaccctttctctactaaaaatgcaaaaattagccaggtatggtagcgcaaacctgtaatcccagctacttgggggactgaggcatgagaatcgtttgatcccaggaggcaaaggttgcagtgagccaagattgcactactgcactccagcctggggtacagagaaagactccgtctcaaaaaaaaaaaaaaaaaaaagaaaagaaaatcaaatatttattggatgcttctatgtgccaagcactgtcctagttccttgccttgcataccagactttatgtaatgtttacaactctatgaccttgtccaaacagcacactcattttgaagatgatgaaacaagttcagaaggtgaagtcactcatccctaaagtgcagaggagtaactccagcagtggtgatcttaatcagtcacataaccgcttgtcatttgtgtcaatcctgtcctagtcacctagcatgcctctttcccattctttaaaaaacccatgtatgagagccaagctgggaccatggctttttggttcttttaagtaaagaccaaatgtcctggcagcgttcaagactccaagctgcctgtctcccgatgtctgatgagtaattgagcatcaccagtgtgtcagttgttaagttaaagaagcgaccaaacaggcctggtgtggtggctcacgcctataatcccagcactttgggaggttgaggtgggtggatcacgaggtcaggagtttgagaccagcttgaccaacatggtgaaaccctgtctctattaaaaatacaaaaattaactgggccggtggcaggtgcctgtaatcccagttactctggaggctgaggagagagaatcacttgaacccaggaggcggaggttgcagtcagccgagattgtgccattgcactccagcctgggtgacaggctgtcaaaaaaaaaaaaaaaaagaagggagcaaacatgcatggcttgcatctgagatctctttctgctggagcttggaatgcatgatttgccctggcttccctaacaaaaacacctgttttattttgttttgttttgttttgtgcccttgtccgctatattttctggccccttccagctaagattcacgaagagattaaccaggtgattggaccacaccggctcccaagggtggatgaccgggtcaagatgccctacacagatgtcgttatccatgaaatacagagactggtagacatcgtgcccatgggtgtcccccacaacatcatccaggacactcagtttcgaggttaccttctgcccaaggtggggttgcaccctcattgcctcccttccactgcactcctctctctccctggttccctacctctgtagcccaacactgatttctcctaactgccctcattttcaccccagggcacagacgtatttcccctgcttggctctgtcctcaaagaccccaaatacttccgctacccagatgccttctatccccagcactttctggatgagcagggccgcttcaagaagaatgaagcctttgtgcctttttcctctggtaggtttctctggtctgacttcctccaggcatgtgctaaatccacccccaagccactggtctgtatttgaagttcaagtcacagtgtgaatttgaaggttatatcatagaaccataaagttttagaatcccagaattagtaaatattaggatgtttgactctgataattagaaaaaaaaagttgggatggtaatagcactaaacagggcataaaccaactggctggctgttaagaacaaaataagacatattttctatttttccagccagatagtctctgaacctttgccattgatcaatgaaagcagccatagacaatatgtaaatgaatgagcatgtgtgtgagcctgaaaaactgtttacggacactgaaatttgaattttgttttatcttcatatatcacaaaagagtcttttttccccaaccattttaaaatgccaaaagcatcctagtttgcaggctgtatgaacacaagcagcagggcaaatttgcccaacagacactcatttgcctactcatgtcataaaatctttatgcagcaacattttaagtgtatgttggcatggcacagtggctcatgcctgtaatcccagcactttgggaggccgaggcaggtggatcacttgaggccaggtgttcgagaccagcctggccaacatggtgaaaccctgtctctactaaaaatacaaaaattagccaggcgtggtgacaggcgcctgtaatcccagctacccaggaggctgaggcacaaaaatcacttgaacccgggaggtgtaggttgcagtgagccgagatcatgccactggactccagcctgggtgacagagtacgaccctgtctcaaacaaacaaaaaacaacaaccaaaagtgtatgtcatttggaacctggagtcaggacagtggttgggaatctggactccactccatcatttagaaatggtggggtcttgggtgagtcacttcagcccccatctgtgaaacagagattaatccctccaaacaattggaagagtggcttataaacagtaagtgttattacgggtgagttttcactttttttcctcaccagtgtctggcacctaataggcatttgacaaacccttgaggaactgaaatgaacacaaccttgaaactcatggatcctatagaaccattccgtcttggaacgggatggaatcccagccatcagagaagtagcaggtcctagctgagcactaactatagatacccactaagcctgtgtaacacccctttataaagcagtcacagtcatgagccctgatgtgcggatgaggcagctgaggcccagtggggtggtcagtccagacacccctggcacccccatgacctgtgcaggtgcaacccttccttctgccctcccctgtgcctgcaggaaagcgcatctgcttgggcgaggccatggcccgcatggaactctttctctacttcacctccacccttcagaacttctctctatgctcgctggtgccacttgtggacatcgatatcacccccaagctctcaggctttggcaacatcaccccgacctatgagctctgccttgtggcccgctgagccacacctcctgcggggcaaggaggaagtggtgaagaatgcagctctcctctcgtgttcaggagcaccccctcttcctcatcttactaatcctcaagcatccctaagaggaggcactatgattacagagtcagccagggtcacctgagaatgtacagctgcgtgtcttcctctcccgtagaagagcaacgccctgtgcaagatttgcacctctgcctgcaggtttcatggtcacatggtcaccgttgcttaggtttctggctgcatcaaattattactgcagtccctgtgtcttcatgttgtccctttttgtgtgtgctctgattttgaccaaaatgtagtctaaaatcctttctccttggttctcatctttacccaccagcccccgaaaagtgaacaaagacctcaagtctgttgagcgtagcaagtttattgagtatggtgtgtgacagcgatgtagggcacagccaacagcttgaaatgtctttcttgacttgttatgagttatagtttctgccagctgctctccagtgacttcccctgggtaaaatgccccatcctcacccatcttgctgactcattacctttctccgccatcatctcttcttctaatcttcctttccagttgctctcagcacaactcccaattccaaatactccccagtccgtttgtttgtttggagatggagtctcactctgtggcccaggctggagtgcagtggcaccatctaggctcactgcaacctctgcctcctgggttcaagggattttcatgcctcagcctcccgagtagctgagattacaggcacgtgccactgcatctggctaatttttgtaattttagtagagatgggttttcgccatgttgcccaggctggtcttgaaatcctgacctcaagccatccacccaccttggcctcccaaagtgctaggattacaggcataagccaacgtgctcggcctccccactccatttttgaggatagctcagttatccccagcttctatcattccctttccagactccattaactgacaaaaacgttccctctttttcatttattcagccaatatttactgaatacccaacaagtgccagcgtagtcttcagggacttgggatccatcagtaagcaaaacagacaaaaactcctgccttcagggagctaacattctagtaaggaaggtggacaataaagcatacatgaaacaaatatgcaaatgacatactgcattagaaaagcaaggctggtaagtgggatatgcattctgtgattggaattgcaaatggatggttaggggtggtttcacaaggtgatggggcaacaagctatgaagatatctgggaagggagtgttcctggcagaaagattaaccaacagcagtggccgggcgtggtggctcatgcctgtaatcccggcacttcgggaggccgaggtggtcggatcgcctgaggtcaagagtttgagaccaccctggccaatatggtgaaacgtatgtctctactaaaaatacaaaaattagctgggcgtggtggcaggtgcctgaatcccagctacttgggaggctgagacagagaattgcttgaacccgggaagcagaggttgcagtgagctgagattgtgtcattacactccagcccaggtgacagtgtgagactctgtctcaaaaaacaaagcaacaaacaaaccagcagagtcctaaggcaggaggctgtgtgcatccaggaatccacagggagcaggtgtagctcgcatggaggaggaagacagagtaggagtgaaggaaacgaggccagggaggcgatggggaccagactgtgtggggtcttgtgggccaaggtgaggtcttggcttttaccctgagagtgattgaggtatttggagggatggtgagcagaggatgacatgtacagacatattttacagggctcacactagctatcatatgatggatacaaaagccaagacctattagcaggctactgcaactggtggtgttgactcagacccagcagcagcagtgaagctgggcagaatatggtagatttgaaatctgtttcactctctgagatggtggggtttgctacggtattgtatatagggtgtgagagaaagagggagttcaggcaggagtccaaggataggatctcatctttgatcacctcttcttcaacctgtcacctccagggaaccttgggacccatgacagtcagggttcctttttttttttttttttttttttagacagagtctcactctctcacccaggctggagtgtagtggcatgatctcagctcactgcaacctctgcctcctaggttcaagtgattttcctgcttcagctccctgaagtagctgggattacaggcacgcacaaccacgcctggctgatttttgtatttttagtagaaactggatttcaccatgttggccaggctggtctctatctcctgacctcaggtgatccactcatctcggactcccaaagtgctgggattacaggcttgagccactgcgcccggccagggttcctatttttaagcaatataaagtgactttggttattttaaatagaaaggctgttagctactggaaggtgattgtttagctcacaaaattaacagcaattctggaaaaatagggtaagaatatgagtaggaaaaagaggctgtggtaggggaccaacagccaaggtaatgttcaaagctatctggtaggacctgctgccacaccacccatctcctgggtactgaacacctgacccaccccctgggtactgccatgggactctagacccactgatgccactatagatgatttcctgattgtgtctgtgtttttgtctcacatcctcatgattaagagttccagacatctagccacatgttaaaaccttagggttcaaggtgaggtgaggaagaatgaatacctccttcagctgttgtagtgggaggcaaagccttgtccctgatcaagagccacacaataggaggtactcagaaaatcagaaaagagttttgagactgtgtgtataataaacaataaatgcggccaggcatggtggctcacgcctgtaatcctaggactttgggaggccaaggtgggcagatcacttgaggccaggagttcgagaccagcctggccaacacagtgaaaccccatctctactaaaaatagaaaaaaaattagccaggcatggtggtgcatccctgtaatcccagctactcaggaggctgaggcatgagaatcacttgaacttgggaggtggaggttgcagtgatagtgtcactgcactccagcctgggcaacagagtgagactgtctcaaaacaaacaaacaaacaaacaataaatgccattatatacattatgggaattagatcctccgggaagctgagatttagacggagttaggggtccatcattttattggagggaggagggtaatgcatgtgaaagaccaaaaaggaaggaagcagatgacactggtagcagaaaagtcttcagaacaggatgcagatccaacacttgtgaaagaaaagaaggaaggaaggaggattggacagagacaggccaagaccaccaggcagagataacagacccataatccagagaaaaatgctgttggggatggtttatgttggacagatagggtcatgccctggatcccagagtccttaattactatttggggcttccttggaaaagcatgggttccgctccacactgaggtgggtcctaatggtgctgcaactggagactctcagctcactgcccttattgaagctgattggaaagttctccatgaatgaagattcaagtagcacatccctatgcccaccacagacaccaacatacaaacccacatcattaaagccttggcacccccttctataaatgcagcatctcagagctacaaacacacctcgcaagtacacagtacaatgggcatcaaacatttttagctgtgaaacgttttttaaaatgatcttacttgcaaatagaatacataaagcaggccgggcgcgatggctcacgcctgtaatcccagggcgttgggaggctgaggcgggtggatcacctgaggtcaggagtccgtgaccagcctggctaacatgatgaaaccctgtctctaccaagaaaatacaaaaattagccgggcatggtggcacgtgcctgtagtcccagctactagggaggccgaggcagcagaattgcttgaacctgtgaggcagaggttgcagtgagctgagatcacgccactgcactccagtctggtgatagagcaagactgtgtcttaaggaaaaaaaaaaaaagaataagcaggagagagaattgttgatctctctttaggtaaagcacagaagagctataggtcctcaaaatagccttcatttctatttatgacgtgagcctattagaaagttcctagaggctggcgcggtggctcacgcctgtattcccagcactctgggaagccgaggtgggcggatcacgaggtcaagagattgagaccaatctggccaacatggtgaaagcccgtctccactaaaaatactaaaattagctggatgtggtggcacgtgcctgtagtcccagctactcgtgtggctgaggcaggagagtcgcttgaactcgggaggtggaggtggcagtgagctgagatcaaaccactgcattccagcctggcgacagagtgagattctgttaaaaaaaaaaaagttcctagaaattctgagaatctaagacattgtagttattcaacacacatcgggtccttccaaggggcccacggaaggacctaatgacataatggtgaccaggaaaagctcagtgactcaccacatagggctcacagcccagcagggaagagtgctccatcctttacagtgacggcccagcatagcccagcatagctctgatgaaggaagcacggagtagaatgtggaggactgtgatggaggaagcccaggtggattaggtaacaccaggaagtatgaggcaggttagagggaatccgtactcctgctatcccctggaagtaattcatttaattagagtaaacatttctcagaaactaggtgaatcaattttcttcctagaactaatcaagacctacaagtcagagaggacattttctttactgtgaggtttttttctttatatttgtttcttttctttttgaaaaagcctttattgatataacttacagatcataaagtgtacaattaagtgggtttgggtgtattaatcaatactgcaaccatcaccatggtcaattttagaacattttcatcacctctacaagaaacctcataccttctaggtcttaccccttttcccccacagtcaattccctgccctgagcaaccacgaatctacttttctttgtagattcactttttttttttttgagatggagcctcgctctgttgcctaggctggagcgcaatggcacaatctctgctcactgcaacctctgcctcccaggttcaagagattctcctgcctcagcttcctgagtagcttggattacaggcacccaccacgacgccaggctaatttttgtatttttagtaaagatggggtttcaccatgttggccaggctggttttgaactcctgacctcaaatgatcgtccggccttggcctcccaaactgctgggattacaggcatgagccaccatgcctggcctagattctctattcctgacttgcatataaattaagtcatatattatgtggtcttttctgactgcgttctttcactaatacttttttaaaggttcatgctagttgtagcatgaagttctgcttcattcctctttgtggctgaacgaaattgcattgtatggatatatcaccttttatttatcagtttatccagggatggatttattagcttcctagggctgcctaggaacctaggtacatataacaaagtaccacaaactgagtggcttaaaaaaacaacagaaatgggctgggcacagcagctcacacctgtaatcccagcactttgggaggctgaggggggcggatcacaaggtcaggagatcaagaccatcctggctaacacagtgaaaccccgtctctactaaaaatacaaaaaattagccaggcgtggtggtgggcgcctgtagacccagctactcaggaggctgaggcaggagagaatgggaggcaaggcggagcttgcagtgagccgagatcctcaactgcactccagcctggatgacagagcgagactccgtctcaaaaaaaaaaaaaagaaagaaagaaagaaagaaagaaaaaatcccatattctccacttattcatccctcctccctaaactcctggcaactactgatctttgtactgtcttcacagtctcactttttccagaatattatatagttggaatcacacagtatgaagccttttcaggctggcttcttttactgagccatatacatttaaggttcctcccagtcttttcatagattgatagctcatttctttttattgctaaataatattgtatggatgtaccacagtttgtttcctcattcacctgttaaaggacatcttggttgcttccaagtcttgcaattatgaataaagctgctgtaaacatttctgtgtaagattttgtgtggatataagtttttgtgtgtggatataaagctcatttgggttaataccaaagagcctgatggctgtatcacatggtaagaatctgtttaactttgcaagaaactgcaaatctgtcttccaaattagctgcgccattttgcattctcaccatcaatgaatgacagttcctgttggaccacctccttgccagcatttggtgatcagttttggattttagccattctaataggtgggtagtggtatatcattattgttttaatttgaaatttttagtgacatatgatgtggagcatctttccgtatgcttatttgctatgtgtatattttctttggtgaggtgtctgttcagatcttttgcccacttttcattgggttgtttgctttctattgttgagttttaacagttctttgtgtattttgaatgtaagtcctttatcaggtatgtgccctgtaaatatgttctctccgtctgtagcttgtattgtcgttctcttgacaattcttttgcagagcaatttgtaattttaatgatgtagaatttatcaattgtttctttcatggattgtgcttttggtgttgtgtctaagaagtcaccagcaaacacaaggtcatctagattttctcctatgttatcttctagaagttttatactcattttttatttaggtctacaataaacttggagttaattttcgtgaaagctgtaagggagcttctaagggggacacacactaacttatttgagagagggcaggtaattgtgaaactcttagctgggtcttacaacagaccctagatccatcaagagaacccaaccttcagaaacccatagtggaatgtttttcatgcatacatggggagagtatgcagtcatatgctcacatgcacaactgtacatgatcacacacatgcatatggtatgtcctgatccagagttctcccagcattctctcagaatgtttctctctgtcaatttcttcattaagcggtctcattgtgtccctgaactgactctcaatggacgacagtggccttacctggtagggggtgcaggctacaccctggtgcacaaagtgtgcttgagtaggtgagagtgggcaagtgtgcagtgaagccaggacaaccgccggccaggtctctggagaaaaccccaggacagggctgttcaggctgtgtgatgctatactaagctgtttgacttgaggaaggggtgctttttaagaatctgcccagagggttgtgttcaaagatttgctgggcacttatattctgtgacacctcagctacagacaactttctgagcctcagctttgtcatgtgtaaaatgggcatgaatgctgttcccctttgcagaggtttgtgggcattaagtgaggtgagcatgcaacggtttttgaacagagctgacacggaggtacttgttcaagaaatgagatgctattattactactctttgtagcatagtttaaggtttcccttcctctcatcccagctctgaaggacatcgtcaaggtgaactgagccccttctgtttcttctcttccccctaaccacctcgccccttcctttccccctgtcctgcccccattcttagccccgcccctcccgcaggcccgctcctggccccgcccttcctctgatcccgcccaccacgccggcaccagcacagccctccctcagcaaggcaagtagcacttggtgtagtttcgtgggattgtgacaaagcccacgtgtttgggggacacaacaatgtccttaggcgactgccgcgatttgaagcggaagttctgcatgatggtggtgaggtagagaaagagctccattctggccaggccttctctgaaacagttccgccttcctgaggaggagaggcgggaggggtggaggtgaagcccactcttagtgcagccttgccccgctacagacctccagctgcggctctcccagggaggaggggtggaatattatggcctgagagactttcagaggaggctctgatcctccctgagcctcagtttccttgagtgtacaaaagatgtacaaaagatggggtgatcgatgccaggtgtcacaatgggaggtttagatgccccttcccccagataacactcgcaaatatgactgctgtgccgtcatctcctttttagggatctgaagaatctgctgtgtgaccctagggaaataaatctctgattctctctgggctttggttttccccgcctctgaaaggggtatgatgtttcctttccttttgcctgggcacaggtactgggtgcttggtagttaagggagtatcagctggtggctcaacggtagattctaacaggaacttccaagctggggaaatactaggctacacggcagagaggggagctgggtaagggaggcccctgctggtgtgagtagtagcctggcagcaaacagtggtctcttactgatggagaagggcacaaaagcatcacgcttcttaaactgccccttctcacccaggaagtgctggggattgaagtcccgggggttggagaagaacctgaggtctctcagcacggagcccagcatagggaacacttctatgccctgggagggaggaggaaggtgtatgtgatgaggcgggttgggggattgttgagagtacacaggggctggagggggaactagggtgccccaggtgaggggaagtggcaggcatgggaattggggacctctgagggaggagccttgggggatagaagtttcacgtctctgagacaggaagtttgggagacatggggttcatgtcctcttaggcagggtgttcagggaacatgaaatttatgtccttaaagcaaaaaggcaaggggaaaggaaaaggagactcatgtcccttgggacagggagtttgtggacatggagttcattcctctccatgtggcaaaaattctgggggagatacaggattcaggagtctctgagagggaagatggaagggatgtggtggttcaaaaaatctttcattgagagagtgagacaggggctagaaagcttctcatggagatggggtgctgaggtcacagagagtgtgttggaagtcctaggctggtggggggacatgcagcaccttggagaggaagaaatcccgaaacttggtgtccttcttgaccctgcgggacacacccatggggagcaagtctccaaatctttggatctcatggatcactgcctctgtgtagagcgtcttggcccggtcctcaaacttgggctgctggttcttgccgatcactctgtcaatctcatggacctttgctgggggaggaaggggaatgcgtttaggtatctaggggtctcagagcagggatgatagcctgaataggtaaaacggggtggatgacttggctccgtgtatgacacggaggtagaccattcataacagatgtcagcaattagcattgttggcgcaggatcacgttaaccaggtcgtgccagaatcacaggggaggcacagggaggaattcaggggatgatccagaggagcgggcagcgggcactcagtgggcttgggacaggagtgactgaccaatcattgcagacattttcaatatttaaatagctaatgagactcagctgatgcctatcagctgaatattgccctgtctctggacagcaaggcacgtctcagggtcctgggatctgggacaggtggggactttgcaccaggctcaggggagttttgagggtctgggaccctccacttcccttcccctccagccttaccctccacctctgggtgcttcatgagcagcaggaagccgtagtgcagggtggtgctgacggtctcagtgcccccaacgaagaggttcaacgtggtcagcaccaggttcttcaagtagaactctgtgttggggttcttctcctcctgcagggagagggggctttaggccaacctcactcctcttgccctcaaggcatgccgccacatctggctaatgttttaaaaaatttgttgtaaagattatatctcgccatgttgccctggctggtctcaaactcctgggctcaagcaatcttccttttccagccccctaaagtgctgggattttggtgggagccactgcaaacagcccagattattatttatttatttttatttatttattttttttttgagatggagtcttgctatgtaacccaggctgtagtatagtggcatgatcttggctcactatagcctccacctccccagttcaagaagttctcctgcctcagcctcacgagtagctgggattacaggcatgcaccaccatgcccagctaattttggcatttttagtagagatggggtttcaccttgttggccaggtcggtcttgaacgtcctcctcagcctccaaaagtggtgggattacaggcgtgagccaccgcgcctggctgaggcccagattaaaatgtttaaaaaagtactctttatgcagattcaccttaacattttaacccattcccaatatgacttgttctattctatcaatcaatcatctatctatcttactctgttttatgctactataacaaaatactacagactaggtaacatatttatttatttttttgagatggagttgtgctcttgttgcccagactggagtgcaaatggcatgatcttggttcactgcaacctctgcctcctgggttcaagtgattctcctgcctcagccttcagagtagctgggattacaggcgcctaccaccactcctggctaatttttgtatttttagtagagacagggtttcaccatgttggtgaggctggtcttgaacacctgaccttgagtaatctgcccacctcagcctcccaaagtgctgggattacagacgtgagcagtagcacccagtctacttataaagaatacaaatttatttcccacagttctggagactgggagtccaagatcaaggagctggtaggttcggtgcctggtgaggatcaggtttctgctttcaagatggctccgtgctgttggatcctccaaggggaggatcactgcgttctcacatggtggaaggtggaagaccaagagaggtgaactccatccatcaagcccttttgtaggggtacctaatcccattcatgatgatggaaccctcatgacccaatcacctgtcataggccacacctcccaatactgttgcattggggattacattccaacatggataaaaaacattcaaaccatagcaatatctatttagtactttttctgaaccacttagggtaaattacatacaacataggttttacctctcaatactttggagagtatctcctaaaaatggggacattttctgatataactgcagttacatttatcagctatagtaaatttaacgttgatgcaatactttcatccctgaggtttatattccaactgttggtttgagaagtaatttgacaactttgaaacgaaatggtagtttctttgttgcctgagtgatgccacacttaagactcactcatggttcagcgtggtggcttattcctgtaatcccagcactttgggaggctgaggcaagaggattggttgaggtcaggagtttgagaccagcccatgcaacacattgagaccctgtcattaccaaaaacaaaaacaaaaaagaaaacaaacaaacaaaatacacaaagaaaaaaaaagactcacatctaagtttccagaggcatctcaacagttaatggcaagggccctggatccagggagctgggctttgatcctggctctgaatgctatcagaaaagtgacgttgattaagttatgtgatctcttcatgccttggtttccccagtggtaaatggggataattttagagatacgtggtgaaaacatttataggtgaattgatgcaaggtctggcattttcttcaaaataatcccaatttgaggaggaggttccaagatggccaaacaggaacagctccagtctgcagctcccagcgtgagtgatgcagaagatgggtgatttctgcatttccaactgaggtactgggttcatctcactggcacttgtcagacagtgggtgcagcccatggagcagggcagggcagcgcctcacccgggaagtgcaaggggtcgggaaattccctttcctagcaaagggaagccgtgacagatggtacctggaaaatcaggacactcccacactaatactgtgcctttccaatggccttagcaaacggcaccccaggagattatatcccacgcctggcttggagggtcccacccccatggagcctcactcacaggtagcacagcagtctgagatcgaactgcaaggtggcagcgaggctgggggagaggcatccgccattgctgaggcttgagtaggtaaacaaagtggccaggaagctcaaactgcatggagcccaccgcaggtcaaggaggcctgcctgcctctatggaatccacctgggggcagggcatagctgaaaaaaaggcagcagaaacttctgcagacttaaatgtccctgtctgacagctttgaagagagtagtgcttctcccagcatggagtttgagatctgagaacagatagactgcctcctcaagtgggtccctgacccttgagtagcctaaatgggagacacctcccagtaggggcccactgacacctcatacagccaggtgcccctctgagatgaagctttcagaagaaggatcagacagcaaaatttgccgttctgcaatatttgctgttctgcagcctccgctggtgatatccaggcaaacagagtctggagtggacctccagcaaactccaacatgcctgcagctgaaggtcctgactgttagaaggaaaactaacaaacagaaaggatatccacaccaaaaccccatttgtacgtcaccatcatgaaagaccaaaagtagataaaaccacaaacatggggagaaaccagagcagaaaagcggaacactgtaaaaatgaaagcgcctcttctcatccaaaggaatgcagctcctcaccagcaacagaacaaagctggacagagaatgactttgatgagatgagagaaggaggcttcagacaatcggtaataacaaacttctctgagctaaaggaggatgtttgaacccatcacaaagaagctaaaaaccttgaaagaagattagatgaatggctaactagaatgaacagtgtaaagaagaccttaaatgacttgatggagctgaaaaccatggcatgagaactacgtgatgcatacacaagcttcagtaactgatttgatcaagtggaagaaagggtatcagtgattaagatcaaatgaatgaaatgaagcgagaagagaagtttagagaaaaaagagtgaaaagaaatgaacaaagcctccaagaaatatgggattatgtgaaaagaccaaatctacatctgattggtgtaattgaaagtgacgcggacaatggaaacaagctggaaaacactcttcaggatattatccaggagaacttccccaacctagcaaggcaggccaacattcaaattcaggaaatacagagaatgccacaaagatactcctcgagaagagcaaccccaagacacataattgtcagattcaccaaggttgaaatgaaggaaaaaattctaagggcagctatagagaaaggtcaggttacccacaaagggaaaccgatcagactaacagcagatctcttggcagaaactctacaagccagaagagaatgggggccaatattcaacattctgaaagcaaagaattttcaacccagaatttcatatccagccaaactaagcttcataagtgaaggagaaataaaaccatttacagacaaacaaatgttgagagattttgtcaccaccaggcctgcttacaagagctcctgaaggaagcactaaacatggaaaggaacaactggtaccagccactgcaaaaacatgctaaattgtaaagaccatcaatgctaggaagaaacagcatcaactaatgagcaaagtaaccatctaatgtcataatgacaggatcaaattcacacataacaatattaaccttaaatgtaaaagggctaaatgctccaattaaaagacacagactggcaaattggataaagagtcaagacccatcagtgtgctgtattcaggagacccatctcacgtgcatagacacgtatggctcaaaataaagggatagagaaagatctaccaagcaaatggaaaatgaaaaaaaaaaaagcaggggttgcaatcctagtctttgataaaacagactttaaaccaacaaagatgaaaagagacaaaggaggccattacataggtaaagggatcaattcaacaagaagagctaactatcctaaatatatatgtacccaatacaggagcacccagattcataaagcaagtccttagatacctacaaagagacttagactactacacaataataatggaagactttaacactccactgtcagtattagacagttcaatgagacagaaagttaacaaggatatccaggaattgaactcagctctgcacaaagccgacctaaaagacatctacagaactctccaccccaaatcaacagaatatacattcttctcagcaccacatcgcacttattccaatattgaccacataattggaagtaaagcactcctcagcaaatgtaaaagaacagaaatcacaacaaactgtctctcagaccacagtgcaatcaaactagaactcaggattaagaaactcactcaaaaccactcaactacatggaaactgaacaacctgctcctgaatgactactgggtacataacaaaatgaaggcagaaataaagatgttctttgaaaccaatgagaacaaagacacaacataccagtgtgtctgggacacatttaaagcagtgtgtggagggaaatttgttgcactaaatgcccacaagagaaagcaggaaagatctaaaactgacaccctaacatcacaattaaaagtaccagaggagcaagagcaaacacattcaaaagctagcagaaggcaagaaataactaagatcagagcagaactgaaggagatagagacacaaaaaacccttcaaaaaatcaatgaatacaggaggtgggtttctgaaaagatcaacaaaattgatagactagcaagactaataaagaagaaaagagaagaatcaaatagacgcaataaaaaatgataaaggggatatcaccaccaatcccacagaaatacaaactaccaccagagaatactataaactcctctatgcaaatagacttgaaaatctagaagaaatggataaattcctggacacatacaccctcccaagactaaaccaggaggaagttgaatccctgaatagaccaataacaggctctgaaattgaggcaataattaattgcctaccaaccaaaaaagtccaggaccagagagattcacagctgaattctaacagaggtacaaggaggagctggtaacattccttctgaaactattccaatcaatagaaaaagagggaatcctccctaactcattttatgaggccagcatcatcctgataccaaagtctggcagagacagaacaaaaaaagagacttttaggccaatatgcctgatgaacattgatgcaaaaatcctcaataaaatactggcaaaccgaatccagcagcacatcaaaaagcttatccaccacgatcaagtgggcttcatccctgggatgcaaggtgggttcaacatacacaaatcaataaatgtaatccagcatataaacagaaccaaagacaaaaaccacatgattatctcaatagatgcagaaaacgcctttgacaaaattcaacagccctttatgctaaaactctcaataaattaggtattgacgggatgtatctcaaaataataagagctatttatgacaaccccacagccaatatcataccgaatgggcaaaaactggaagcattccttttgaaaactggcacaagacagggatgccctctctcaccactcctattcaacatagtgttggaagttctggccagggcaatcaggcaggagaaagaaataaagggtattcaattaggaaaagaagtcaaattgtccctgtttgcagatgacatgattgtgttagaaaaccccactgtctcagccccaaatctccttaagctgataagcaacttcagcaaagtctcaggatacaaaatcaatgtgcaaaaatcacaagcattcttatacaacaataagagacaaacagagagccaaatcatgagtgaactcccattcacaattgcttcaaagagaataaaatacctaggaatccaacttacaagggatgtgaaggacctcttcaaggagaactacaaaccactgctcaactaaataaaaaagacacaaacaaatggaagaacattccatgctcatggattgcagtaatcaatatcatgcaaatggccatactgcccaaggtaatttatagattcagtgccatccccatcaagctaccaatgactttcttcacagaattggaaacaactactttaaatttcatatggaatcaaaaaagagcccacattgccaagtcaatcctaagccaaaagaacaaagctggaggcatcatgctacctgacttcaaactatacttcaaggctatagtaaccaaaacagcatggtagtggtaccaacacagagatatagaccaacagaacaggacagagccgtcagaaataataccacacatctacaaccgtatgatctttgacaaacctgacaaaaacaaacaatggggaaaggattccctatttaataagtggtgctgggaaaactggctagccatatgtagaaagctgaaactggatcgcttccttacatcttatacaaaaattaattcaagatggattaaagacttaaatgttagacctaaaaccataaaaaccctagaagaaaacctaggcaataccattcaggacataggcatgggcaaggacttcatgtctaaaacaccacaagcaatggcaacaaaaggcaaaatggacaaatgggctccaattaaattaaagagcttctgcacagcaagagaaactaccatcagagtgaataggcaacctacagaatgggagaaaatttttgcaatctactcatctgaccaagggctaatattcagaacctacaaagaactcaaacaaaattacaagagaaaaacaaacaacccagtcgaaaagtgggtgaagttccccttcctgtgtccatgtgttctcattgttcaattcccgcctatgagcgagaacatgcagtgtttggttttttgtccttgcgatagtttgctgagaatgatggtttccagcttcatccctgtccctacaaaggacatgaactcatcatgtggggtggggggaggggggagggatagcattaggagatatacctaatgttaaatgatgagttgatgggtgcagcacaccaacatgtcatatgtatacatatgtaacaaacctgcacgttgtgcacatgtaccctaaaatttaaagtataataaaaaaagtgggtgaagatatgaacagatacttctgaaaataagacatttatgcagccaacagacacatgaaaaaatgctcatcatcactggccatcagagaaacacaaattgaaaccacaatgagataccatctcacaccagttagaatggtgatcattaaaaagtcaggaaacaacaggtgctggagaggatgtggagaaataggaacacttttacactgttggtgggactgtaaactcgttcaaccattgtggaagacagtgtggtgattcctcagggatctagaacgagaaataccatttgacccagccatcccattactgggtatatacccaaaggattataaatcatgctgctataaagacacatgcacacctatgtttattgtggcactattcacaatagcaaagacttggaaccaacccaaatgtccatcaatgatagactggattaagaaaatatggcacatatacaccatggggagggatagcattaggagatatacctaatgtaaatgacgagttaatgggtgcagcacaccaacatggcgcatgtatacatatgtaacaaacctgcacgttgtgcacatgtaccctagaacttaaagtatatatataagaagaaatagagaaagtacatgctttctctatacacttacatgctgtatgtaagtgtcatacagaggtatgctctgtaagacacttacctcagcatatacagttaaaccctttttctatgtggttattgagaatttgactagtggtgttaattatgggtagccaccggtactgatcagtactttttgtttattcctatttttccaggaaccatttgttttacacattgttctctgtattactcatatttacccagagagaaaaatatatcactataatttgtaaaattcatatgtttaatggaaggagcaaaactgttctccacttattacaattatttttgaaacataaaaaaagttgtgaagatttcatcttaatatggacatttatctgttctcaaataatacttttataatttcttatgcctgtctttagtatcttaatcctgttatcttcagaagctaaggatgtgtgtcacctcaggacctctgtgataattgtgttaactgtacaaattgattgtaaaacatgtatgtttgaacaatatgaaatcagtgcaccttgaaaaagaacagaataatagtgatttttatggaacaagggaagacaaacataacgtctgactgcctgtggggtcaggcaaaaagagccatatttttcttctttctttcttcttgcagagggcctataaatggacgtgcaagtaggaaacatattgctaaattcttttcctagcaaagaatattaatattaataccctggtaaaagtatgcgttcctggggggaggtctataaatggctgctctgggaatgtctgccttgtacagttgagataaggaccgagataaaccttggtctcctgcagaaccctcatgcttactagggttgggaaaacttaaccctggtaaatttgtggtcagactggttgtctgctcttgaaccctgttttctgttatttaagatgtttatcaagacaatatgtgcaccgctgagcatagacgcttatcagtggttctgcttttgccctttgccttatgatctttgttggacccttatcagtggttctgcttttgccttttgtcctgtgatctttgttggacccttatcagtggttctgctttttgctctttgaagcatgtgatctttgtacctactctctgttcttacaccccctccccttttgaaacccttaataaaagcttgctggtctgagacgcaggtgagcatcatggtcctaccaatatgtgatgtcacccctggtggcccagatgtaaaattcctctctttgtactgtctctctttatttctcagctggccaacacttatggaaaatagaaagaacctatgttgaaatattgagggtgggttctcccaataataatacagacatgaaaaacatttgatggaaatccaacatccattcctgattaaaaattatcagcaagctagaaataaacagaatttcttaccctgactaaaggcatctacaaaaatatctgcagccaacatcatacttaaaggtgaaagacttgatgctttccctctaagattgggagcaagtaaagaatggcggttcttaccactctgattcaaaatcgcgctggaggttctatctattattccactctctaggtccatgtgtacacattgtgtagcacccacttacgaatgagaacatgtgatactttctgtgcctggcttatttcacttaagataatcacctccagttgtatccatgtggctataaaagacaagactttattcctttttatggctaaatagtattcaatggtgtatatataccacattttatttaaccattcatctgttgattccctatctttgctattgtaaataggatttggaccacatttcaagtacttaattagtggccacatgcagcaagttactaccatattggacaatgtagcctcaacccactatatgaccttgggtaagacttgcaaactgtcactgcttcaatctctccatctataaaatggggatggcaacaatacctccctaaaagggtaaagactgagtcactgtgtgtaaagcacttcatgcctccccactggtgcttcaccctggggctggaatgagcacccaatcttagcgtcagatgacacagcacagcaggaccctggtccttgggtcagaaaagtccatgctggcacctctccagtgtcaggaaagtacagcttccacctcataaaaatcaggattgtttatcttatcctcctgggtcaaagtaacttctgggctcagggtaaacactgagtcactgtgtgtaaagcacttcacgcctccccactggtgcttcaccctggggctggaatgaggacccgatcttagtgtcagatgacacagcacagcaagacccaggtcgttgggtcagaaaagtccatgctgcctcctctccccggtcaggaaagtacagcttccacctcttaaaagtcaggattgtttgcttctcctgggtcaaagtaacttctgggctcagggtaaacactgagtcactgtgtgtaaagcacttcacgcctccccatcggtgcttcacgctggggctggaatgaggactcaatcttagtgtcagatgacacagcacagcaagacccaggtccttgggttggacaggtctgtgctggcacctctccagggtcaggaaagcacagcttccacctcttaaaaatcaggactgtttgtcttctcctgctgggtcaaagtaacttcagggtcaggatcctggatccagcaaagagtttggttaacattgcaagaaagatgttgcctcatggtcaaaagtcaggcctaggatgagacaggcagacacggacacattcacatccaaattgtgcaaatatggactgaccctgtcagaggctgtgtgggtgcaggctcacagtgaagatagagacatatgggagtccagtagacatcaatcaaactggacccagtttccacacacatggagctcaagagtctccagggggaaaacagagacataaagttagagagagatagagccagagaaatttcctgcaccaggaagatagttgggaagaaccccctcagcgctagttagagtgatcagaaaccaaggggacccgatcactgcacctgccagtctcagtttctgtctccctccaactgaccacctcttcctctgagactcactggttctgcatttcttgcccctccttctgtttctcccatcacttccacctatggctgtcacagaaggactgataaaggaggggacactggagatagaccctgagcattgaaggcggccagcccccccacacctgtgggtatttctcatcaggttggacgagagactgagaaaagaaataagacacagagacaaagtatagagaaagaacagtgggcccaggggactagcgctcagcatacggaggacctgcactgacgccggcctctgagttcactcagtatttattgatcattatttttactatcttagtgaggggagtgtagcagggcaacaggttgggagaaggtcagcacagaaacatgtgagcaaaggaatctgtatcatgaataagttcaaggaaacgtactgtgcccagatgtgcacacaggctagatttatgtttctctttacccaaacatcttagtttagcaaagagtaacagagcagtattgctgccagcatatctcgcttccagccaccgggtggttttctcttatctcaatagaatgaatgggaatggtcagctttacaccaagacattgcattcccagggatgagcaggagacagaagccttcctcttatcccaactgcaaagaggcctccctctttcactactcctcctcagcacagaccctttatgggtattgggctgggggacagtcaggtctttcccttcccatgaggccatatctcaggctgtctcagtggggggaaaccttggacaatacccaggctttcttgggcagaggtccctgtggctttccgcagtgcattctgtccctggttaatcgagaatggagaatggtgatgacttttaccaggcatactgcaaacatattgttaacaaggcacatcccacacattcctaaatccattaaaccttgattcaatacagcacatgtttctgtgagcacagggttggggctaaagttacagcttaacgcatctcaaagcagaaacaatttttcttagtacagatcaaaatggagtttcttatatcttccttttctacatagacacagtaacaatctgatctctctttcttttccccacaagcgtctgcaggcttccaaagagaggggctaggagatgcaccaacacagaagcacaaatacaccagcacacacagatacacacaattggttcacatattgctaggttacagtttgctatgcgacaaaggcagtggaccagatttgattgaattgaacaattccttcttttcatcagcttctcaattttttttttgagacagagtattgctctgtcacccaggctagtgtgcagtggcataatcctggctcactgcagcctccacctcccaggttcaagtgactctcttgcctcagcctcccgagtagctggaattaaaggtgcccaccaccacgcccggctaatttttgtatttttagtagagacggggttttgccatgttggccaggctggtctcgaactcctaacctcaagtgatctgcccaccttagcttcccaaagtgctgggattacaggtgtgagccactgcacccagccagcctcccaattttgaacacacactaccaccacctccacaacacacaaatgtaaatgcactttcatatatgaaactgtataaatacaaggaagctccacacgtgcaaggatatacacataagcacccccagattcaaccacagaaacacacgcctgcacatttgcataaatacaaacaccactttacatataaaaatcatataagcacatacacggatgcaagcaagcatggagaaatgcacggaagcataaacaaacagacaaagctaagtaaaaaagtgtgcatgctcacctgtgcttacaaaaatacacatactcatacacaaacacccacacgttcacatgcttaggtggactttgatatctctaccactgtatccctgccaacatctagagagtggataagggataggcattaggtcgctgggttgcctaagcaggaagtctgggttccctaacacctttttctaagctaatgctccttgacgataatgagaaaggaggcggggaatggatgaagtttcataactgagtgaagaggcaggttcaggataaaaggcccagttagaggctgcagtggggtgcagggcagtcagactggaaccatggagctcagcgtcctcctcttccttgcactcctcacaggcctcttgctactcctggttcagcgtcaccctaactcccatggcaccctcccaccagggccccgccctctgccccttttggggaaccttctgcagatggacagaagaggcctactcaaatcctttctgagggtaagacacagacgaatggggtctgagggtgggctgcttcttgtctctgtacttggggatccttcaccaaacagaatgaggcagacttccagagtcaggggtggcacggggatggttggtgagtacagagcatagtgaagcatgatgggtggtagtattaggagaaaaacatcagtcaaattaaatttagcagagtttatttgagcaaagaagtgactcatgaatcggacaactccctaaaccaggagagacaccacacggcagtatgggcaagcagtattcacaggcagaaaaaggaggtgacatacagaaacagcctggctggccacagatcacagcttgccttacttggtcacagtctgaggagctagcagcctgtggtggactgaaagcccagctgctctgattagccaacatttggctacttgtcgcaagaatctattcatctgggccgggtgcagtggctcacgcctgtaatcccagcactttgggaggccaaggcggtggatcacctgaggtcgggagtttgagaccagcctcgccatcatggggaaactgtgtctctattaaaaatacaaaaattagctgggcatggtggtgtgtgcctgtaatcccagctacccaggaggctgaggcaggagaatcacttgaatccaggaggcgaaggttgcagtgagcagagatggtgccactgcactccagcctgggcgacagagcaagagtccatctcaaaaaaataaaaataaaaaaaagaagaatatactccctcccaagttaggttgcagttcactctatgcagagagaactttatgtcaaatttaatttaattaaacaattctccccttttgatgagcctcaaaattttgagattgaccaaaaccttgggcatcaacattacttctgtcaccatcataatggacttgtttgctctcagtatggaattcacaatggacaatgtcaaagtagttgagtgattctttgttttcttcatgtttttgttattcatactgtaatgaagccattggatgtacaaagaatggctgcatatgagcatttaagactctctctcttttttttttttttttgagacagggtctcactctgtcacccaggctggagtgctgtggcatgatcatgtctcactgcagcctttacctcccaaggctcaggtgatcctccgcctcagccccccgagtagctggaactataggtgcatgccaccacgcccagctactttttgtattttttgtagagacagggttttaccatgttgcccagactggtctcaaactcctgggctcaagcaatccacctgcctcggcctcccaaagtgctagccattgcacaggtgtgagccattgcacccggccaagactctcaagaaaatacaacacatcagggagactgttatgatggctctcaggagggtaatacaaagaaaatgaagtctgtaccttaccgggagtctccatgaaccaaactgatcaaaatcgaataattcaaagctcaggcaataaagatagttcaatagtattagagtccaattggtcatatactttgttcagagcacaatggtgattaaggactagagcttgctataaaataacttgatttacagaggcatttgtttttgtagttcacctggtaacacatgtcatagtaccttggagacccactagaagaaacattaagagtagaaaaccttgtgataggcttgctgtattagtccattctcacagttataaagaaatacttgacactgggtaatttataaggaaaagggatgtaactgactcacagttccacatggctggggaggccccaggaaacttacaatcatggtagaagttgagggagaaggaggaaacttacattcatggtggaaggtgaaggagaagcaagtaccttcttcacaaggtggcaggagagagagagagagagagagccaagggggaagagcctcttataaaaccatcagatcttgtgagaactcactcactatcacaagaacagcatgggggaaactgcccccaggatccaattacctcctagcaggttcttccctccacatctgaggattacaattcaagatgagatttgggtgaggacacagaaccaaaccatatcacttgccatcaccattcaggatgcttgcaaatcaactgttacctgcacccgtaaatacatatcttctttttcccctgagaattttccttagtgtatttggtggcagtgtctagagaaacagcattgtcagccacattttaaattaagttatatgtactagtaaattcacgggaaagataagaacaatatttggttttgttcagcaccatacacaagcctccaagatgggcaaagaggagatctaaaactgcatgatgttccattaagcgtttttgtttaatacaatgttctcatcctccttttggagagtggcttctacccatctgaactccttggaggttcaattggctacataatccaagatgtcccttaatgtataaattagcctcagattccatacaactgtcaccccaatatcaccaaaagtgagcacccagggactccattggaaccttttctctgcagaaaccaacttatcttcatcgactttgaggttgatagtaatttcagttattgactgttttggcttttaactgtgggaggtattagggaactctcaaggaaaaaatttggaaagcagcagtgagctaggccaaatagcaagttacgggccagtgaggagaaagaacagagtaagcgaacctcagcagacccaaggtaggcacttgtggggttggaaaagagggtcacctactggcattagagcagatatcagttaaatttgtttacacataagtctgcacagctcttgaacaaggtgggaagctcactttttttgtggtctctttctatcatgctgcaagggtgcatagccacatttagttggaaagagactttactgtatttacttatttatttatttaattattttttatagcgttggggtcttgctatgttgaccaggctggtctcgaactcctggcctcaagtgatcctcccatctaaatctcccaaagtgctgggattacaagcacgagccatcatgcctggccactttaccatatttaattcagtaacattacacatgcaattaaccgtacccacataggtagtccccaggtcctatgcgggatgcctggaagcacaatatgctttttgcagccatcattcagatacattttctatatttggtagtgattatattattagttagttaatagaatgttattacatactgttattgtattatattaactaataactagttattagttaatagtatgttattacatactgttattatattaaataactaataacataaccactatcaaatatttccagtgagtgcaaaaaagcaagtggcaattgatgtctagaatatcaagatatagctttccactcctcctttggggtttccgggtgattcccattgggaacacaaagaggcattggcgccagtgaaattatttcctgattttggggaactggctcacaaactcaacaattgcttgtcttttttcctagggtataagcctttgctaaagccattcacagattattgtactatggattttcttgtaaggaaagggaaagggttaggacagcaagaaacagggaagaaaggataaaagataatgctttcatgatggaagagaaatcttgatccacagtcttggaaaagctgtccacatataagatgccaactgcttcttgggaaaaactttcctggtcagctttgccttaaggtctcaacagacataaagttctaggagtctagaaggacccttttcaattgagagatgtggatccaagatcccagaccctgaagttttgctacagagaagaacttggcattgtcctttgcaatggagtacaaggacagtcttagaagaacctggtatggttacttccaatggagttcaaggacagtttctctggtgtcatttccaaagagcccaacctctaaattatagatagtgaaaggtctggttgtcatcaactgatgggtcatcaatgactccttttacctggtgaaaacatgccttggcataatgtattaaagccttgcattattgaatcatatcagagtttataagagtgggagatacatgagattctattattggggcataggacttcctattactattttacaagtgatctatctatgtctttccaataggagtggatctgattgccgtcaatcaataatacctttgaccaagggactccaatcaattcagcatgctttgcctaatgccttttgtttgtaatactgttgcgggacaatcaaagactggagagaccaaaaaaggttcaggagagtttattaaattaaggtgaccactggctcagccagaaatatgtccagagagtctgagccccgaacaaagggctttgcctgcttttaaacatcttaaggtgggaactacatgaggtgggaagcaagttacagaagggagaaacaaagcagttaattaacatttcttacatcttaagaaagacatgtgttgcaacctaaacttatcagtcttatgaccctgcagccatgcaggaactcactgggcctgtaataaactttaaggaatgtggagttgggaagaagagataaggtccattgtccacagagagaagaaaggttgttaatattctcttttaacttgaatgtaaggtgggggtcacactttgcagcaactttaaaaggattttaaaatttctattactactactattaggttatagttgatttcattaattccttcttcaataccttatttaagtattttaccacttctctagtgaagcaagtacctctaccactggagagttctccaggaatgccaagtaaggaaatacattttctaataacattttagctactgttatggcattgatctttgtgcataaaaaagctttaatacaaccagaaaacatgcaatgaaggtggcagttgaattaactccatcttcaagtgttcaaatgatctaccaagtcccagaaatatatcacctgtggtttttggtttttgttgtcttactagaattatggatttgataaatcaaatattagttataaaccattagaacagtcacctcatcaatattttttcataatttggatcattttatctcttctatgatgagtcgtggaatgcagagcttttagtaatggaaattttaagaactcaggaaggatcaggcggccatccagtgtctccatgagtgcatgcttcacactggaattacagcctcttaaatacaaattttaataccataagtaccaatttatgcttctccaattcaggtacataacactggtttattaaataggttatcataggtaatttgatggtgccattgcactccagcctgggtaacagattgagaccctgtctctgaattggaactgcacgggggcactgtccttggaggggtgagtgggcatgacgaggtgtctgggtatgagccacaggtgtagaatttcactcttctctgccatcctctgttacatcctgggtacctgcctgccactgaaagaatgaggtaaaagaggtggtggcacgaatcaaatagattttgctgtgccaatgagagagagcagactagcccatgtcagtgccaggagagtggaggagagagggagagcagcaaaggagtgtgggtagggagtgctcatcaacagtacacatagtgccctataccggtaactgccactggctcagtatttacctgggttatcactgcttaccatgcctgattttatgattaattatctacttatcattactaatcaatcaacccactttccaatgggagaattagaatactgacaataccttccccttccccctctcatgttgaccatactcctgaatcttaggcttgttatccttttgctattaatagagtttttttatttctgatcaatggtctttttactgatagagtaaatatgcatatatacagagtatatatgccaatggtactatgaattttaaaattatttgcttagacagaatatgtggacatacaaatgatgaatgtgataattgtcatacatatatatttatcttagacacttagtcaaaacatgtggtttttggttatgagttagacactgtcactttagctggaagatacaaagtaattgggtcatagactctcaaattatggaacacttagatttttcaggggaatgacatggagggagccaaggagtcttatgattaggtaaaatattgtttgggtggctcacgaccccactgggcaacactcaaagatgtggtggcttatgcctgtaatcccaacactttgggaggctgaggtgggaggattgcttgaagccaggagttcaaaaccagcctgggcaactgaacaagaccctgtctccacaaaaattttttaaaaatttagccaggcatggtggcctgtgcctgtagtcccagctacttgggagactgaagcaggaggatcacatgagccccgcagtttgaggttgcagtgagctatgatcacgtcactgcactccagcctgggcaacagagcaagaccctgtctcttaaaaaaaaaatcatctgcagtgtgaggagtgacaacatttaggaaagtgtgcataggtttaaattctggtcaaagacatcctacacaattcactgaaccttctctttaagggttttttctaaactctgcagacactatctggagaccaatcatgcctctattaacagaatttgctgctccttctagctcttggtatctcactgccccctttctttatgagagctggcatggtcattgaatatcccaatcctttacaaattctgaaacaagcaaaactgtcaatgaaattcatatttgcctaaaatgagttttcaaaaggatctttgtggctatcttgttagttcatagaaagtggaggcttgtcaggaacgatattgaatttttcatttaaattgttttagagacagggtctcagtctgttacccaggctggagtgcaatggcacagtgatagctcactgcaaccttgaactcctgggctcaggagattctcccgccttagcctccagagtagctgggactacaggtgtgaacgaccatgccccactatttttttttatttttgtagagacgtgttgggggagggtctcactatattgccttggctggtcttgaactcctggcctcaagcaatcctcctgcttcaacatcccaaagcattgggataagttttgaatagacatgtttgaccctctccccttcttcgttgcagcaaagatttccattttctcacagggagggcttggggtaaatagtttgttttgttgttgttgttgttgtttgaggatgtgggtgggtcatcttggttaatgtcagtgcaagaacagtgtccgttcctcattattggggttccttagccatccaggcaagcagtagctcccttgagaagacttcctgacccccaggtccccaccataggctctcatacaccagctgcccctccttactgagcctatgtccttgacaatgctgcatttacttgtgatcctgtggctgatctctccctcacacttccagacaaggaaggcctgcgaggactcaccacagagctgaacatagtgcctggtacacaataggcgtttagcaaatatgtgtatagaaacaaatgaaggagtcagtgagtgaaagctccaagcctgactcagcagaactgacagtcggccggggcctgcaaagtgctaccaggcccccagtagggggtcgcagatctaaggatccctccccaccaaatagagtcccatcacataggtgaaggtctcaagtgcctattgttttcttttcatcattttccatgtgtcacgagaatatcatgctatcatgtgaatcaatggacttagttttcccactagagtaatgtgtctgggaattacctgtgttgtcatggggattttctaggtgtcatttacaactacctgtggacaaggtgaggtgctaccctcatcttagaagtagggatggtggccgggcatggtgactcatgcctgtaatctcagcactttaggaggctgaggcaggcagatcaactgaggtcaggagttcgagaccagcctaactaacatggagaaaccctatctgtactaaaaaaacacaaaactagctggtgtggtggcacatgtctgtaatcccagccactcaggaggctgaggcaggagaattgcttgaacacaggaagcggaagttgccctgagccgagattgcaccattgcactccatcctggtcaacaagagtgaaattctgtctcaaaaaacaacaacaacacaacaacagcaataacaaaaaaacagtagggatggagatgctcagcctggggaaagcacttgtccagtggcacacaactaggaaaaggagaagctgagctccagcaggaggtctgtctccaaagccctcctagactaaagctgcttaacattttgtggattatgaaatcctctgagagtttgattaaagctgtggccccctcttttccaaataggcacatacatgtttgcataaagttgtgaggcttcacagactccctaaaactctttcataaaccttccaagggtcctctaggtattcatgaccgtctattatgattgcatctcttgggggtaggggaaagagggagggcatgagcaagtgtgtgtcaaggctgaggaaggtggcgctgttgcttctccatttcccaataagcttccagattccttttggagccagagggatgcgggctcgtgtctcagattcaattcttatgcgttgagtcacagttttctcttctgtcaattaagaccatgacaatgagaatgtgtgcccctaaggtggttgtgagaattaaatgggatattgcatgcagctagtatataataagtgctcattaaatggcaactaccttgatccactcattcatttattcatgaatccaataacaattcactgggcactttctatgtaccaggaaatattctatgaattgatgatgtggcatcttggacaagacatacgaggtaacactgtgcttatggacattccattggtggagacagataagcaaaaaataaacagataaggaaatgttaggtggacaagagctacgattaaactaaagcaggaggatatttcagaaagtgatggagaactacattagattgagtggttagggaaagactccgccttgctttgtttcttagcagggaccaggaaagattcaggtggaaggtgccagaaggaggcagggtggttgcaagaatcctgaagcaggaaaaatctcagggaacaacatggaggaatcagtgggaggagaagtcagagaggtgatggggccacatcatgtaggaccatgtcaaccacaggtggagacttcagatcttattctcagcaaagttggagtattggaggccttggtgagcacagggatattaattattttacattttagtggggttaccctggcttgtggggcagtgaaacagttgttaaggggtctaagaatgtaaggcaggagaccagtgaaggggctttgcagagatcaatgcagggcatttgtaagtaaacttaaacatttttctaatttttatgtcaagtttttattgaaattgaacatcactataaaaagtgcacagctcaatgaattttcacaaactgaacatactcatgtaattgacatgcaggccaagtagcaagagtcccccaaaacaccacaccccgtccttttctagtcactatccacctaccatcttgatcatgggttgattttgtctgtgtttgaacttttttttcttttttgtgagatggagtcttgctctgtcacccaggctggagtgcagcagcgtgatctcggctcactgcaacctccacttccccacgctcaaggaattctcttgtctcagcctcccgagtagctgggactacaggtgagggccaccacgccagactaatttttgtatttttagtagagacggggtttcaccatgttggtcaggctggactcaaactcctgacctcgtgatcagcccgtctcagcctcccaaagtgctgggattacaggtgtgagtcaccatgcccggccctgtgtttgaacttcatacacataaaattatgatgcatggactctcttgtgtctagttgcttccactcaacattatgcctgtgagtttcagccacgttattgcatgtagctgtagtttgttctttttcgttgctgtatactattctattgtgtgaactctcactgtttctctatatctgtgttgatgagtattttataaagaaagcttctgtgaatatttgttcattttttggtgaacacacatacacatttgtgctgggcatgtacctgagagtgaagtggatggtttcccagttatccatttgttcagcttcaggaaatactgcccagcggttccccaagtggctgcacagtaatcccaccttatccaccggagatatgttctgagacccccagtggatgcctgaaaccccaaataatgctgagccctatatatactctttttttcctatacaatcacattatacagggagggtggtatacacagtgcagacggggtggacaaagggatgattcatgtcctgggtgggacagagtggatgatgagagacatcatcatcctacttagaatggtgcacaacttaaaacttacaaattgcttatttctggaattttctatttaatattttcagactgtggttagctgcaggtaactgaaactgcaaaaagcaaaaccaggccaggcgcggtggctcacgcctgtaatcccaacactttgggaggctgcggtgggtggatcacgaggtcaggagatcgagaccatcctggctaacgtggtgaaaccctgtctctactgaaaatacaaaaaatcagtcaggcatagtggcaggtgcctgtagtcccagctactcggaaggctgaggcaggagaatggtgtgaacccgggaggcggagcttgcagtgagccgagactgcaccactgcactccagcctgggcgacagaccgagactccgtctcaaaaaaaaaaaaaaaaaaaaaaaaaaaaagcaaaagcaaaaccacagatcataagaagtatggggtgagggtgatattcgtagtattttatcaaccatctctactgtttagggcagcagccaattagagcagaccctggctgggccaccaattaacctaagcttgtccaacccaccttattttgttgttgttgttctgttttgttttgtttcagtctttcagcagcctgaagccatggttttcagattttgtctctagtaatatacagaaaagaaggatgaggaaggggttttactggcccaatcagaaacagaaactaagaacctatgactgtattctctcccttggacaccgttaactgttaacccttacttgctggatcctggcaggggaaagggcagcctggggaggcggatgttgaggaggggctaattaccaatctggtatgtaagtattttgatagttttacaaatgaggtgtatgctgactaacagccacccctggtgtggatgtgattggcagttccgagagaaatatggggacgtcttcacggtacacctgggaccgaggcccgtggtcatgctgtgtggagtagaggccatacgggaggccctggtggacaacgctgaggccttctctggccggggaaaaatcgtcatcatggacccagtctaccagggatatggtgagggcttcagaggcactgggagggggcaggtgggggtgcatcagggaagggagtatatggggggaagaaggactcagagccttcttccaacttcttctgcaaccaactcacacctcccctgcactgcaggcatgctctttgccaatggaaaccgctggaaggtgcttcggcgattctctgtgaccaccatgagggacttcgggatgggaaagcggagtgtggaggagcggattcaggacgaggctcagtgtctgatagaggaacttcggaaatccaagggtgagtcctgggagacgaataggaaagaaaggcaatgaaacactgagagatgcaggcacgggaatagaaaggcagagaggtatacatgggcagagacagagacagacgaaaccagagacatgatctgacagaggtatagggacagagagtgagagagacaggggaatagagagggacggggattggcaggagagaaacagagccagggaaagagagagatgccaggtgtataatgtccaaaagttactcaaagaggctggatgcgatgactctcacctgtaatcccagtactttgggaagcaaacagcctgggcaacataatgagatcctgtctctacacaatataaaaaagaaatgagccaggcatggtggtgtgtgcccgtagtcccagctacttgctatggtgggactacaggatcacttgagcccaggaggttgaggctgcagtgagctgtgattgtgccactgcactccagcctggacaacagagcaagatcctgtctcagacaaacaaacaaagaaacaaacaaaccctgaaagacatatattttcatggatcaattgtgtctatcgaaggcaaaatcagaagttatgtaaaagaaagcaaagagataaaggaaaaaactacagacatttaacaaataatgacctgtgttttccttgccctgggtgaagtgctgatgagctggcagtgagcaagcaggccaggtgggatgttctgcccgggtgcagctggaggggtcatcaaagaatcactaggttatttttgagttctccataactgggtgtctgtgggacatgtaggtgacgggtctctggctagtacctccatctcatttatgccaggtgtttaccatctctcttatcaaaatttctcaagagactctgggacgtaaatgcagaggctgcgtggggaggtagaaacacaggagctataggcaaacagggacaagaagactgaagagaaggacaggaagaaacagagtgacacaggcaggaggaaagagacagatggagggaccaaaacaaagagatatatagactgggcatggggctcatgcctgtaatcccagcactttgggaggttgaggctggtggaacacctgaggtcaggagttcaagaccagcctggccaacctggtgaaaccctgtctctactaaacatacaaaactagccacgcatggtggcacgtgcctgtaatcccacctactcaggaggctgagactggagaattgattgaccctgggaaatggaggttgccatgagctgagatcatgccactgcactccagcctgggtgacagagtgagactgtgtctcaaaaaaaaaaaaaaaaaaaaaaagagagagagaaatatacacacagagagacagaaagaaacaaaggcaaagagaaattgaggcagaaaaaattagaggagagacagacagacaaggctcaagaaagggtctgcagaggaatgagagaagacaggcaagtgagacccagagagaggctgcactaacctgacattcttgggtgctcacagaccaccctccctccagctggggccagtgctgagcctggtgtatacaggtatcacttaacaagtgcagaataatgcccggatgactggagagccctagatgtagaaagaagagattatgggggagtaacaggtgggggtagaaagatggttttttatttgttttaaattagggacagggtctcactctgtacccaggctggagtgcagtggcacgatcatagctcactgcagcctcaaactcctgggcccatgtgatcctcccacttcagccccctagactccttcaactgggactacaggcatgtgccaccatgtctggctacatttttaacttttttgtagagacaggttctccttatggtgcccaggctggtcttgaattcctgatccttttgcctcaggctcccaaagtgctgggattagaggtatgagccactgtgcccacccagggctttttaatttatacaagcaattgattaaacacctactctgcccagcccctacccctgggatttagctgtattcactcccagagtcagaggtggggccggagaggaggtgcagagtgagaaccggctgcatggactcgatagctgtgttgcctgggtctaaatcctggcctcaggaatgagtagctgtgcaactttggtcaaattactcaacctctctgtctgcccatctataatttggagctaataatcaaattgcatctgcctcacattgttgtagtgagagttcagtggaattacacgtgacgtgctggtacataattagctgttatggttattctcatgtttaccattactgagtgatggcagacaatcacacagagataggtgacagcctgatgttccccaggcccttcagtctgtgtccttgacctgctgcttcttcctaggagccctcgtggaccccaccttcctcttccattccattaccgccaacatcatctgctccatcatctttggaaaacgcttccactaccaagatcaagagttcctgaagacgctgaacttgttctgccagagtttcttactcatcagctctatatccagccaggtccaggagagggagaaggagagggagggtgggggtgaggtgaacatccaggacacacgagaaaaggatgacctgacttgggggctcagaaatgcagcttatccctggaagaaatgcagagaccacgtggagtcagggacatggagacctggagggaggggaggcggtgagacagggatagagacagtgagagagagaatggggcacgatggggaggcagaaacagagtcagagagagactgagagaagaaagatgagcaaaaacaagacaaagaagggcagagatcaagagatcctgagagacagagttgatgagaatgaatgtgaaagagagggagagagagaatgaatcaggctttgggcttgatctctgctcttctgctcctggatgtctttttttttttttttttttttttgagacggagtctcgctctctcagccaggctggggtggagtggtgccatcttggcttactgcaacctccatctcctgggttcaagtgattctcctgcctcagcctcccgagtagctgggactgcaggcatgtgccaccacatctggctaagattttttttttttttttttttgagatggaatcttgctctgttgcccaggctggagtgcagtggtgcaatctcggctcactgcaacctccacctccctggttcaagcaattcccctgcctcagcctcctgagtagctgggattacaggcacctgccaccacgcctagctaatttttttgtatttttagtagagacagggttttgccatgttggccaggttggtcttgaactcctgacctcaagtgatctgcccgccttggcctcccaaagtgctggaattacaggcatgagccactatgtccagcctactcctggttcttctgtatgcttgcttctctgtctttggtaaagctcctcacctgaagaaattcaaggatacaagacaataaggaacagcatttcttcattttctcccattgctccttctccctgtttttttttttttaaaaaaaaaaactttccacagattataaaggtaatcttctgctcttttaaaagaaaataataaaatgtctccttattgattaacctggaaatatgcctattacatattaaatttaagaatatcaagctgcagaacagtatgcatagctgtagtttgttgttgttgttttcagacagtatcttgctctgttactcaggctggagtgcagtagtgtgatctcaactccctgccacctccacctcccaggttcaagcaattctcatggctcagcctcccgagtagctgggactataggcgagcgccaccacacccagctaatttttttgtatttttagtagagatggtgtttcaccatgtcggccaggctggtcaacatagctacagctcttaagcaggggtgtatgttggattcacatgtggggttgtcacagttatggattttcaggaccctactttccaggcggtctgatctggaaagtctgggatggggtccaaggtgagtacttgtaacaagcccgaccaataattctaatgttctcctcccaccgagaaccacagagaaaagtctggaaggagacccaccagacagttaacaatggttatctctagaaggagagattaagaaggaattttacatcgcaatatacgtttgcatttttgcaattatttgcaataaattaggcattccattcttcatcaaagtaatagaaataacctccaaaatacatagtcctaacatgtcagcaggcttatcttgtgtaagaatcattttattaatgtctgacacagcaagggagatgaggagaggagggaagagggagagaaaagtatgagaaagacaaataaacaggccgaggtagacaatgggtgacacagaaaggaagtgagacagagactaagagagatagaaaggagagaggcagggagatggggcagaggccaagaaaaagacagaaggatgagggaggaagatgcagaaagaggtaaatgtgagatagatcaaaggagatatagagtcagtgagtgaggggttcagaggcagaggggagtggggaagtggggttcccatggagggattggggcccaggaggcgctctctccctgtgacctgctagctcagccctaggcaaacctcaccaccccttctttcttgcagctgtttgagctcttctctggcttcttgaaatactttcctggggcacacaggcaagtttacaaaaacctacaggaaatcaatgcttacattggccacagtgtggagaagcaccgtgaaaccctggaccccagcgcccccagggacctcatcgacacctacctgctccacatggaaaaagtggggtctgggagaggaaaaagggaagggaggggagggagggcaagatagagaggtgagaagagggagggaaaaggggtagggaaggggaagatggggagtgaagaacaaagattagggaggggagaatagtgaaaaggaggagagcagatgaggaaggaaagaaagatgaggtgaaaggaaggagaaaataggaggaactgagatggagagagagtggtggtgggaagtgggggagagagagagagggagagagaagactggctgaggaaggaatttggggcaagagacaaaaatacagcaacaggagaaaagactcacggaggtagaaagagactgggagacaaaaagagagaaacacatcaaaaagatgtggagagagatagaaacagagccaggcagagtaaaaagaggctgagagagatgagttagagatgtgcagctggacatgtagaggacagagaaaagcaaattgggccagataatgtcaaagaccttcaggcaaacggagggcagccagggagacaggcgtgtgcacagcaaggctacagcctctcctgaccctgccctcccctccctactgtggacgcaggagaaatccaacccacacagtgaattcagccaccagaacctcatcatcaacacgctctcgctcttctttgctggcactgagaccaccagcaccactctccgctacggcttcctgctcatgctcaaataccctcatgtcgcaggtgggccagggacagccagtcaagggggtcttctggactgcagaaatggggctatgggtaccacctggatgagagaggggatgctggcttcctattccgggatcactgtaggctctggactagcttccaatcaagccaattctgttggtggatgcatggacgcatgaagaatctgtccatgcgttctcccattgttttcttccatcactcaaggatcttttttttttttttaagacagagtcttgctctgtcacccaggctggagtgcagtggcgcgatcttggctcactgcaagctccacttccaggtttcatgccattctcctgcctcagcttcctgagtagctgggactgcaggcgcccgccgccacacccggctatttttttgtatttttagtagggatggggtttcaccatgttagccaggatggtctcgatctcctgatcttgtgatgtacaaatttagggagtacatatgcagttttgttatgtgcgtaggttttgtaatggtcaagttagggccgttagggtatttatcacccgaacagtgtacattgtacccattaagtaatttctcatcattcacctcccccttctgctccctcgctcttcttagtcttcactgtctgttgttcctctctctgtgtccatgtgtacacattttgtagcactcacttatgagtgagaacatggaatatttgactttctgtgccatgacttaaaaattgatccgttcatccacttatcttttcatctattctttgtttaatttattaattaaagaatgtgtactcactgattttttcatttatgattcatccaaggacatatactgtgtcattcatttatttggattacttgatccacaagttgatcctttgaaacagtgatatgttgatggacaatttgtcattgattcattggttcatttattcattcattcatgcattcttccatccttctatgaactaggtttcacccttatccttccatcagtcagtctttcaattcacccttaatccatccatgctttccttcatttatcacaataattcactcatttattcacctctgatctatttatcattcaatccagccattcatttattcctttatttactcatacttcactaatttacttattcacttgttcttccataaatctagccattcatgtgattattcattaattgggttcattgatttctttgtctatggaccattcattagtgattaattaatcaatcaatccatctattaattggtaagtaaatatatacatccatttattggtttgttcatttcttcatcaatctttccttccatgaattgatctattgattgattgattgatgtttttatccagttgttcatggattcatctattgttctattacactgttatatacctgaggaccaagaatagtgtctcacctataatatacacacaataaatattagtttattttctactcatcttagagagggtgttttgatttgtggcctggagttcttaatctgaaattccatgcaaaatcgtgttatgtgtgtgcatatgtgtgtgtgtacctgtgcatgtgggaagaggatccataatagtcattagatttcaagcagtgagaattcttgttgcttccttcctgctctcctcaccccacgctgattgctttgaggagtatcaaagatctaagcctttactgtaggtttttaattggtcaatagaaagtagtgtccctgctgaaaggtctctttttaaaaaattttctttccttcttttttcttttttttaattttgagacagagtcttgctccgtcacccaggctggagtgcagtggcatgatctcagctcactgcaacctccacctcctgggttcaagcgattctcctgcctcagcctcctgagtagctaggactacaggcttgcaccaccacacccagctaattttttgtatttttagtagagatgggattttgccatgttggccaggctcatcttgaactcctgaactcaagcaacctgcccacctcagtctcccaaaatgctgggattacaggtgtgagccaccatgcctggcctcaaatgcctctttaaaatgagattcattcatcttcttctctgtgcagagagagtctacaaggagattgaacaggtggttggcccacatcgccctccagcgcttgatgaccgagccaaaatgccatacacagaggcagtcatccgtgagattcagagatttgctgaccttctccccatgggtgtgccccacattgtcacccaacacaccagcttctgagggtacaccatccccaaggtaagactggctgcacccccacatccctcctgtgtgggcatcctggattttcttaatccccaaactcaaccttttgttagcttctcaattgagtccccttgtttttgtttttttctttttcttttttgtgctgtgtgtgtggagggtgggcagggaatggcaatatcttttgatcttgtgatccttcctcaggacacggaagtatttctcatcctgagcactgctctccgtgacccacactactttgaaaaaccagacgccttcaatcctgaccactttctggatgccaatggggcactgaaaaagaatgaagcttttatccccttctccttaggtaagctggacccacagtttctttcccagacaccagagggcaggtcctatcctcaacttgagaaaaaaaatgacaggtccttattaattgagcacttaatatattccaattgcttcacctgccttatccccttccatcttcactacaaccctgtaaggaggcttgagaaagaagatgacattcccaaaggcacatctgggcaagcaggaacttgggcaagtattttaacatctctaaacctcagtgaattcattttcttaaaaagaaaaaaatctgttgagcaccgctgtaagcccagtgctgtactaggggctgaagacaatgcatcaaacaggtcacacggagacagggttcctgccccaggaaatttaaagtccagcagggaagatggacattcatcaaataataataaaataatcatctcatgaaatgaatgaatgcctgcaacatgcttggaactgcctggcacaaaggacatgctcacggggcaattattattataattagacataattgtgataagtgctctaaagggagctttgggagcacaaaataggaaatagtagctaatcttgtggtgggtcattaaggaaaagcttaccagaggaactggcttccaagccgagatgttcatgggtgggcgtcaatcaatgattgcaaagtgtgttccaggcaaaggaaacagcaagggcaaaggctaaaggtggaaatgtgatggtaccattgagaatctataggaagtccagtgagccttgggtgtagattgcggaagggaataagacaaagggctcagctgggcaggaccttgaaggctgtggaaggagtttggatttatggtctagcactggggaggtggagaaggtcttgacgtgctctgacttgtcccagttctcatcctccactctttggctggttaagagaaaaactttaggcaaattaaacttagcagagtctatttgagcaaagaaacaattcatgaattgggcagcacacggaaccaggaaaggttcagagagctccacccagcaatgtgatcaggcactatttatccatagggaaaggaactgaggtacagaaacagcctgattggttacagctctgtgtttgccttatctgagcatgtctgggcagcttgtagcctgtgactggctgaagcttggctgccctgattgtccaaggttacttgttacaagaatatactctcaagttacattgcagtttgtttacatgttgagttacgttacagtttgttatgcagggaggctgctttaggccaaatttaatttaatttaacacgcaccatccatgaaaggccccagaaacaaatccctagtcttgagtttcatcagtgacttcagcaacccagggtcctggcccagcccctggttttgtgcagtacagtgacctccttccacattttatcttcaatgacagttaggaacacatggggtgatggcttgagggtcaatgtcttctctcaattttgctgtcttgtttttttttttttttccttttttgagacaccgtctcgttctatcacccaggctggagtgcagtggcacaatctcagctcactgcaagctctgcttcctgggttcatgccatcctcctgcctcagcctcctgagtagctgggagtataggcacctgccaccatgcccggctaattttttgtgttttttagtagagacagggtttcaccgtgttagccagaatagtcttgatctcctgatctcgcgatccacccgcctcagcctcccaaagtgctggaattacaggcgtgagccaccatgcctgagacattatcttaaggtttctttttttttttttcttcagacagggtcttgctctgttgccctggctggagtgcagtgtcatgatctcaggtcactgcaacctctgcctcccaggttcaagcgattctcctgcctcagcctcccaggtacctgggactacaggtgtgtaccaccatgcctggctaattttttgtgtttttagtagagatggggtttcaccatgttagccaggatggtcctgatcttctgacctggtgatattccttcctcagtctctcaaagtgctgggattacaagcgtgagccattgtgacaggcctgctattttgttttaagagaggcagagatgtagggaaataaggacagagacagataagtaacaaagataataagattgagaaacatagttggggacaaagagggaacacactgagagatagagatggggagacagtggcagaaggacagacagcaggtgaacatcaggcagtatacggagaggaagagagagagacacacacagagagagccacataaggagaagaggaggaggaggaataagaggagagggaggaggaaaaggaaggcggaggggagaaggaaggagggaaaggagagaaacagaataagagataggaaaaagagagagtgacacaagaagagaggaagaaagaatgaaggagacaaataaggtatctttagagggagatgaaaagaaagaaggagagagagagagattggggagcaatcagattcaaatagatggagataggaggttaagcaagatggaagaaagccaaaaaaggagaggaaaagaagaaaaactgtgtctgacaggtatagacagagaaaaagacaggagtagggctgccaggggcagaaagaaaggtataacccaagccaaaagggtactgcagccaaagaaattcgaaaggtgtccaaacagatggccccagagatggggagggcgtgatgagagggagataataagcatcaggctgttgtggaaaatgttaggtcacacaaagagctacagaagaacaggcccagagacctgcctgtttctaagctcatgttgcccaacttctggatgtgccaaagggacatggacccatttccagacacctccacatagacacacttgtccaacaacttggcaggcatagggaatgcctgaaaactcacacttgacatggcctttccaaggtttgcagattatgaaacactgaagtgaagggaaaggctccctttgtctctgcctcagctttttccagctccctttgttctcatttttctcccaatctgtggtttagaacctactgggggttccttgcacctctgagaatcggtggaagccatagaccctccctgtctcatatgcatcagtcccattcacaatttatatacaatttgggttttttaccccctgagctcttgaagcctgtggatctcaggctgagaccagaaaacagcctagagacacagacacagacacatggccagaaacacataccccacagatacccccagaaacaaacacaaggcgataaccaaaccttaaggctccttagcagaagccaagtgctgttctaagaatttttacaattgtctcctttaacctcagaagagccctttgagagaggtgccattctccccgtatgagaagtgaacactaagaatgttgtcataaatgtgctcacacacatgtagaggtacacacacacacacacacaaccagaagtgggtcattatacactgtggggatcaccaaaccctttggaactgtaacagaagctacaaactctctactagaaaaatgaacatggcgccgggcgcggtggcccacgcctgtaatcccagcactttgggaggccaaggtgggtggattacctgaggtcaggagttcgagaccagcttggccaacatagtgaaaccccatgtctactaaaaatacaagaaattagccaggcgtgggggcaggtgcctgtaatcccatctacttgggaggctgaggcatgagaatcgtttcaacaccctgagaggcagaggtcgcagtgagccgagatgtcgccgctgtgctccagcctgggtgaccgagagagattccatctcaaaaataaataaataaatacataaataaataaataaataaataaagagattgagagagagagagtgagagcgagagcgagagcgagagagagagaaatgaacatggcacatccattcaaagatttgcacctggtttcagagcagcttcctaaaagtccaccctgaattgtaggttaaaggccagtcttatgcaaatctcttgcagtggacatacatgtctgggcttagggacatggcagagcgaagtgtatgcacctgccctgtgcccatgctggtgaccttctgtgcccacagggaagcggatttgtcttggtgaaggcattgcccgtgcggaattgttcctcttcttcaccaccatcctccagaacttctccgtggccagccccgtggctcctgaagacatcgatctgacaccccaggagtgtggtgtgggcaaaatacccccaacataccagatctgcttcctgccccgctgaaggggctgagggaagggggtcaaaggattccagggtcattcagtgtccccacctctgtagataatggctctgactccctgcaacttcctgcctctgagagacctgctgcaagccagcttccttcccttccatggcaccagttgtctgaggtcgcagtgcaaatgagtggaggagtgagattattgaaaattataatatacaaaattatatatatatattttgagacagagtctcactcagttgcccaggctggagtgcagtggcgtgatctcggctcactgcaacctccacccccggggttcaagaaattctcctgcctcagcctccctagtagctgggattacaggtgtgtgctaccatgcctggctaatttttgtatttttagtagagatggggtttcaccgtgttggccaggctgatctcaaactcctgaactcaagtgattcacccaccttagcctcccaaagtgctgggattacaggtgtgagtcaccatgcccggccatgtatatatataattttaaaaattaagatgaaattcacataaaataaaattagccattttaaagtgtacaatttagtggtgtgtggttcattcacaaagctgtacaaccaccaccatctagttccaaacattttctttttttctgagacggagtctcactctgtcacccaggttcgagttcagtggtcttgaactcctgatgtcaggtgattctcctagttccaaatgttttcattatctccccccaacaaaacccatacctatcaagctgtcactccccataccccattctctttttcatctcagcccctgtcaatctggtttttgtccttatggacttaccaattctgaatatttcctataaacagaatcacacaatatttgattttttttttaaaactaagccttgctctgtctcccaggctggagtgctgtggcgtgattttggttcactgcaacctccgccttccaagttcaagagattctcctgcctcagcttccaagtagctgggattacaggcatgtggtaccacgcctggctaattttcttgtatttttagtagggacatgttggccaggctggttgtgagctcctggcctcaggtgatccacacgcctcagtgtcccagagtgctgatattacaggcgtaatatgtgatcttttgtgtctggttcctttcacgttgaacgctatttttgaggttcgtgcctgttgtagaccacagtcacacactgctgtagtcttcccccatcctcattcccagctgcctcctcctactgtttccctctatcaaaaagcctccttggcgcaggttccctgagctgtgggattctgcactggtgctttggattccctgatatgttccttcaaatccactgagaattaaataaacatcgctaaagcatgacctccccacgtcaagaggtgatctgtgccattttgtgtgtgattcttttattgtcaggtccctagggatttttctggaaggaatgttggtgagaacgcctccctcacctcagtgacaactctgtgaagggccaaaccattgtcttgctcgtcactgtactctcaatacagcatgtggcatatgacaggtgttcaaaatatttggtgaggaatgaatgaatgagtggctaaatcagccacccactacccccacagcccacagaaaatggagctaggctactccatcagactgtgtctcctccatatcccactttcttctttggcccagaataaattatcatccccaaagggcccaggatgcccccagttctgcctgccagttactctcaatcccctgtgctgcaatgccaccttttgataaagcttagcgctattcttgaagtggaaccactctaaattcagcctccaggctggacacggtggcttatggctataatcccagtactttgggaggccgagtcaggtggatcacctcaagtcagggggtcgagaccagcctgcccaacatacagaaaccctgtctcaactaaaaaaatagaaaaattagctgggtgtggtggcacgcacctgtagtcccagctacttgggaggctgagacaggaaaatcgcttgaacgcaggaggcagaggttgcagtgagccaatatcccaccactgcactccagcctgggtgacaaagcgagattccatctcaaaaataaataaataaataaataaatacaacctccacatattccaccagcaggaccaccacccttccctgagggagttgttgcaagtttaatatctttatcgcaaggatacatcagccagcctgtggccaatgggaagctggttctgggactcagccctgagatgctaaccttttggcctctgcagcacctgccagctttaggctccttgtagcctctgaagagttagcagggactctgcctgtgcaaatgcatggcacacattccctcaccaaccacagaaataaaacaacaaacagagaaacatgtcttttaagagtgacagcagaatctgcccggcttatttcacctaacataacttcctgcagttccatccatgttgctgcaaatatcaggatctttttcttttttaatggctgaatagtactcccatctgtatgggcaccatatgaacacttaggttgattccatatcttggctgttgtgaacagagctgcgaaatacatgggagtgcagacatctcttcggtatacagatttccttttattggaatacacttagcagtgggattgctggattgtatggtagctcgatttttaatgtttttcttttttgtttgtttatttttattttattttattttttttttgagatggagtcttactctgttacccaggctggagtgcagtggtatgatcttagctcactgcagcctctgcctcctgggttcaagccattctcttgcctcagcctcccaagtagctgggactacaggcacccaccatcacgcctggctgattttgtatttttagtagagatggagtttcaccatgttggccaggctggtcttgaactcctgacttcaggtgatctgcctacctcagcctcccaaagtgctgggattacaggcataagtcactgcgcctggcctatttctacttttttttttaaggaaactccatattgttcctcaaagtggctctactaatatacattaccaccaacagtgtacaaaggttccatgggggattctttcagattgagtggtcagagagggcttctttgagaaggcttctgagagttggccatgagaaggtgtggtgagaagccttctcagctgagggaacagcaaggtaaaaggcccggaggtgagaaagcaaacttggcaccttccgggagcaagcaggcattgcctctgataatgtttcctcctggtaaaatgacagctctgggagggcagggttcttatttcctatctatctatctatcatctatctatctatctatctatctatctatctatctatctatctatcatctatctatcatctatctatctatcatctatctatctatctatatctatctgtctatctaatcacctatctttctatgtatctatcatctatgtatctatccatctgtctttatttatttatagagtcagagtcttgctctgttgcccattgtattagtccgtttttatgctgctgataaaaacataccttagactgggtaatttataaagaaaaagaggtttaataaactcacagttacacatgactggggaggcctcacaatcatgctgaaaggcaaaagtcacatcttacatggcgctggcaagagagagaatgagaaccaagtgaaaggggttttccattataaaaccaacagatcacatgagacttattgactagtatgaggacagtatgggggaaaccacccctatgattcaatgatctcccaccgggtccctcccacaacatgtagggattatggcagctacaattcaagatgagatttggatggggacacagcaaaaccatatcacccagactggagtgcagtggtgtgatcatggctcattgcggcctccaactcctggattcaagcaatcctcccatctcagcctcctgagtagtgaggactaagtttgtgataccacctctggctaacttttaaatattttgaaaggatgtagtcttgctattttgcccaggctggtcttgtactcttggtctgaaatgatctccccatcttgacgtcccaaagcactgagattacaggtgtgagccattgcacctggcaggttctcatttacttaattattactgttgtcatggtttgctttggtccctgtgggttcccccaccctccagaacaagtgcctgacatatagtagggttcacaataaatatttgtggagtaaataagagctgagccttcaagggatccaaaatacttgcatggagtttttctaggtgggtacaatgccacccagctgcatgactatttcagggtgttcattggctcctttgggtgatattttgacatctatataagaactcccacttctccaaatctgggggccacatctttagagttctcagcttcccgtctgtcaggaatgaaggagataatatcactgattggagccagattgtctggatgttgaatcccagctccttgctggtgcccttgagaagtgacttaagccctctgtgtgccttatttctgcctctgtaagcagagatcatcatagcacctctaatgtggggctgtttgaagattcagtgaggtatgtgcaaagagctttttgcacttccaaaaagtgtctgggatatcattgtgcactgtaagaatgcactgtaacaattatcattgagtcttcttgttgggattaaaagagatcaggtctgtcagggcctggtacagaagtggtatcagaaaaataatgacgtgccggctgctcacaaggcttcccaggccaagctggtgtgggaaagagagtttctggagtaccagatgagttggtctcccctatgtgagacacccatggggagccatgggcggcctctgaggagaaaagtctccttattgtctttatgtctttatgctcccagagcatacctgctcagcggcattccacaggttgctcagggagataacacttccttaaagcagtgaagtacaatcaaacatcttggcttcttctgaaacccactcccacccatttcagtcctgataagattttaagtagtttagacacacgcctttgctcaaggaaattcacagaaactgccactgctctacatcttattgaataactcacgagttctccttcattgattaatcctttttctcatcccttccttgccttctcatctgccctaagaacaaagagcttgtaagccaataaattaggcagagccaaagagctctgggccatgagcaagcctctgacactctggtcccccggacccaccttttaaattctcactctgtttctttctaactctttagtctccgttggactcgcggtacctgcagggtggtgtggggctggtttccccaacatctggcgcccaacgtgggactccccgttatctctacaaataatctggtgaaggaatgctagagcatggaaagtggaagatgacagaaaaagggtgcctgaatatgttttcacttcaagctctgtggataagtagtgtgcttggagaattccacggtaacctcgggaaaacgggtcaggctgagagtaaatttgctaattacttaagcttggtgtggcagttattgtgccacagaggggcaattgtgagtacccaaaatctcacatctttgttccagctcatagaaaagtattccccttggttcccggaatatggaaccatgaatgtaaaagactgcgacaagttcggagcagacttaaaatgagcacaacaagagggctacaatattcccttgtctgcttggtctgtgtggtcagcaatcaaaataccactggagcctttccacactgaggaggatgagaagtttcaggatgacatagaaaagtttaataatcaggagtttgatgatctgcaaagtgaaccatcacagtttagttttaaaaagggggagaaagggatatatgctaacctccaaaaacttatagaagaaacatttccacctactgcagaaacagtgccacccactgcgcctttaggggaaggtccagaatggccacccccgcctcagccttatgaatttttggaatgggagcctgagacatgacttgctgctcccattgttgcatgccccacaattaactatgttgaagggaagcttcaggctcacccaacagccaattatggtgagggaatgatccaggcttgtccaccttttaattatggtagaggaatgctgtgagcaggtccaaatacaaattacggtgcagggacaatccaggcatctatttaccaggcatgagatgtgggggatttggatgcttggcagtttctggtaattatttctccagctgaggagcccagacaacatgctgaagcatgctgggagccatttccttttaaaatattaaaagacttaaagcaagcaattggacaatatgggccaaattctccttaggttcattccttgttacaatctgtggcttataacaggcatttaatacctatggattgggaggcattagcccactctaccctgtcccccactgagtttctccaatttaaaacctggcggacagatcaagcaacaacaaatcaggcatgcagaaatgctcaagcccaacctcctgttaatatcacatctgatcacttgcttggaatcagacaggcatggggtactctaaattgacagatggtaatgggtgatgagactgttgatcagctcagaactatatgcctcagagcctgggaaaaaattcacgaccctggtactacttatacttcttttaactcagttcaacagggtccaaaggagccttatccagattttatcacccatttgcaagacacggctcaaaaggctattttggattctcatgtcaggaaagtgatagttcagctgcttgcttatgaaaatgctgatacagaatgtcaggcagaaattagacctattaagggaaaggcagatctaaatgaggaaaaaactttaagtgaatacattaaagcctgtgatggcattggaggcacttgaataaggccagccttcttgctccggcaatggctagactaagggtaacaaaaaacatatgagtgttccccagatcttgctataattgtggacagataggacatacaaaaagagagtgtacaaaaaaggcaaaacttaggaggaaaaagcagggaaccaggtacctgtcccagatgtaaaaaaggaaaacactgggctaatcactgtcattcaaagtttgataacagcggacagcccttgccaggaaatggacagaggggccagccacaggccctaattcaaaatggggcattcccaattcaggacaggacgtccctgactacaaatggggtgttcccagcccagtctttccctgtacaaatgtgcagcaattgttcccctccacagctaaaagtggggcagtagatttatgctgtactgaagctgtatccctccttcctggggagcctcctaggaaggtcccaatgggagcttatgacccattgccagatggcaaggtgggaaggtccaacttaaatttaaaggcaattcaagtacacactggagtagtggactctgattgccagggagaaattcaaattgttatctcctccactgttccctggagtgctaatccaggtgacagaatagctcaactgtggcttttactgtatattaatttagaagaaagctcagaaaaaagaacagaataatttggaagcacaaattcagcaggcaagcctccctattggtaaatcaagtctctgacaatagatctatttgtatggtcactattcaaggaaaacaatttgagggtgtggtcgacacaggagcagatgtgtccatcatagctctttatcaatgaccaaaaaagtggcccaaacaaaaggccccagtgggtcttgttggggttgagggtttgcttgtatctcaccaggagagaatcagcttcctgtctgggtacccacaagacatcttaagttgtgccatgagccagaacccaaggaagaggaaaagacctcggaatgtctctgcacccccagttcatcagatggctcagatgaacatctctgttgagcagatggaaaccagtaaaactcaccaagcaactccactgacctgggggcagatgaagagactagctcacgttgcagaagagaacctgaggtctcagaacaagccgctgaccaccagtaatctaatggtagctatgatggtggtaatctccttggtgtgtcaccttgtagctgaggcagatcaaaattacacttattggacctaaattccattcccaccactgattaggcctattacattgttagaccccccagtagaggtttatattaatgatagtgtctggatgcctggaccaacagacaaccaaggtcctactcatccagaggaggaaggaatgttgtagccatgacctttaatcagatggtcccattgcagagttgtgttaaacctccttttatgttggcagtgggaaaaattaatatcctagctgattctcaaaccatatcatgcctcaactgtcatctttttacctgcattaattctacctttaataaagataatagcatgttactgtttagggcccgagaaggagtttggatacctgttcccctcaatagaccttgggaggcctctccctctatacatattatcactgaagtactaaaaggaatacttaatagatcaaaatgattcatatttactttaatagctgtgatcatgggccttatagctgtcacagctactgctgctgctgctggtgttgctttgcactcttctattcaaactgtgggctttgtggatagttggcagaaaaattcttctaagctttggaattcccaaagccaaatagatcaaaaattggcaaatcaaattagtgatctccgtcaaacagtaatttggatgggagattggattatgagcttggagcaatgtgattggaatacttctgatttttatattacttctagcttttataatgccactgtacaccattgggagatgattagatgtaacccacaaggaaaagaagataatttaaccctagatattgctaaactgaaaaaacaactttttgaggtatctcaggctcgtctcaacctgttgctcggagctgatattcttgctggagccactgatggcctttctaataccaatcctttaaagtggattaaaaccatagctggatcaacaattgcaaattttattttggtttacgtatgtttatgctgtttgtttttagtctacagatgcagacgacgccttcggagagaagccagacactgtgaacgagacatgatagtaatagcggttattaataaaaaaaattaatagagacaaaaaaagggagacctgcgggaaaaagagtttctggagtgccagatgagttggtctcccccgtgtgagacacccatggggagccatgggcagcctctaaggagaaaagtctccttattgccttcatgtccttatgccctgagagcataaccgctcagtggcatttcacaggttgatcagggagatagcactccctagaagcagtggagtataatcaaacatcttggtttctcctgaaacccactcccacccatttcagttctgataagttaaagatcttaagtagtttagacacgcctttgctcaaggaaatacacagaaatcgccactgctgttcatcttattgaatgactcacgagttctccttcattgattaatccttttcctcatcccttcctcaccctcccatctgccctaagaacaaagagcttgtaaaccaataaattaggcagagccaaagagctctgggcctctgacgctctgtacttctctgactctctcctctgagtctctttttttcacttgtctaagtctatccagggctctgggtctgtctgtatctgcatttacacctttcggagtgagcatctctctagctgtccacctcttcctttctctgtgtgtgcctctttccatctctctctgcttctccctctagcagtgtcctgtgtctttctcagattccttctccctgtttcactgggtcccagttattccctccatcccttcccaccttcttccctccctccctctccttcccctccttccctcccttcctctcccccttctctctctctggcactttgtctttctttctctctctgtctctccctggttctttctgtctctccctttctttccatctctccctggtgctctctctctctctccatctctctttcctctccccatctctccctgtctccatctcttctttgtgtcctctgtctttctgtctctctctcttctctctctctcttaatctgtctcaacaccccatgtctccctggtgctctcggtctctctctttctcagtctctctgtctctctccattcccctccctctctccttggtgctctttgtccttctttctctgtctctctttctctcccatctccccctggtgctatctgtctctctttctctccatctctctctctacatctctttctctgtctctctctcttgccatctctccctggtgctctctgtctgtctctctctctctcttcatctctctcacccccccatctctcactggtgctcttaatctctctttctctctctccatctctctgtctccctcctcccctctccatctctccttggggttccttgtctctctttctctctctgtccatctctgtctgtcttctctctctctccctctctgtctctgtctttctctctctctctctctcccatctctccctggtgatatctgtctctttttctatctgtctctctctttcctctctctctctctccatctctctctgtctctttctctcctgcatctctccttggtgctctcaatctctctttctctctctccatctctctgtctctctcctcccctgtctatctctccttggtgtttttgtctccctttctctctcttctctctctctctccatctctctctgtctcccccatctctccctggtgctctctctctctcttgctttctgtccccctggaacctttgtctctttctctcttcttacccatgctctttgcccacatacctctccttctggctctctgcctgtgggaaggagtaaggcggaggtgattatgtaattgtcattattccagagggtggggtgagggatgaggaggagatcaggaaggaatactttctttcttctcacctatccatcaacctggcctcatagacacctcccccagctccatggctactgaattgggtgggtaggtcagatcactgcctcccttccccagggaaggtcagagaatgaatcgtacagaaccagagggattgaggggctcaggctgggagacaggctgcagtcaggtggagcttcccaaaggagacaggcaggcctcagggctctccctcagctgccagaaaaggtgaaaagcagtggaatcaagatgccagtggaggctttggggagctcccaactcagctgggctgaggactgaggaatccagtttctaaaacaccaaaacagagacctttgagagcagaaggagggatgcctggcttccttcccagccctctggctctggaattcaacaagagagaaagggctttgctgcttgtccccttttgggtgtgtgtgtgtgggcacttcttggtcactatagtgaacctgaaaattccataagtcattaccccacctactagagaaaaatgcaaaagatttacactcccagcacctacacttcagcactagggatctcctcaccctagccacaggtctcagtatctcttacccacttcctgatatatttgagcctgtcccgggctgtcgaggcaggctcaccacactctttccatccttcaatctatctatctatctatctatctatctatctatctatctatccttttaattttcatccttctgtccatatgtccacaaattcatcaaaaaatccactaattatttcttctatataaatatcttttgctctattatctatacatgtaccaattaactttccatttatccatctatccaatattccatccatccattcattaacccttccatcattcaacaacttattaatatttacatccacctttccaattattattcatctatttcaatccatccatcaattaacccttcacccatctattaaatctttcatccatccacccgttagtcattctagtcataaatgcttccttacatccatccatcaatcgagataatttcattaaatttccattaaatttctagtgcattggaataagactcaatccacacttctggtaatctctaaatgtttcttactacacagtaaccccttttgtgtaggcatatcaatgtacaggtgtgagcttctgtgtacacatatgtgcatgtatccagagaatccaagtggtgtctagaaaatagaattaacatccccattccagggcagtctatatggcattctcgcaatacctcctcccactttcctatgcattcatccacttatttatatatgtaagaaggttcaggtctccttcctgtaagaaacactctttactctgcccctatcattcctagactgattcccctttcctccaactcagtctggacttttgttttttttggggggggatcctgcagggagagaaccttactctcttgatttcttgattgaaccttgaaggttgggagtggcttccttgacagcacagtctagagctttcataatccctccctatcactgtctagcacagacttgaacacaggaggggaggcaggcagaagcatgagactgagatgtagctctggccaaaggagaacgacagaggtgtagctctggccaatggagaatgatggaagattctttgatgcttctccaggaagccagctacctactggaggagttccagaagaccaagggcttgggggccacagggggagggctactaggtgactatgtggttatggagaactcagtcatgagaagatgggccttactgggagaaagctttggaatgggagaaaagggaaaatattaagaattcactgagctttctggccaggtttcatattaaacttaacgtaagctgggtgcagtggcacacacttgtagtcccagctactcaggaagatgaggcaagatgatcacttgagcctgggaggtcaaggctgcagtgagctatgaatgtgctattgtacttcagcctgggagatagagtgagacccagtctcaaaaacaaacaaacaaaaacaaacaaaaaacataccagttaatgtggaagagacttagagtccacttgtctagaaaccctaatccttgtcatcactctaaaatgtgaaacaaacatttcacactctgaccacaaccactaggtccccaactccttcactgcatcactgccaatagcctgaggcatacactggccaactaggtctttgggtaaggttccaaagaatgcaaaaactgtaaaaggtcaaggctccctcctggtaaaagactgtttaaaataacatttcaaaatcttgcgttacatacagggaagtttttcaagagccataagaaattacgggcagcttttctaatgtctcataaagaaaagaggtggggcatgacagtccaaagaagtgattaaaagcataaaatttacagtcacaagatcatacccaggctctgccctcattagctgtggaagccagaagcaagtcatttacaacttttggggctttacctaactcatttgcaaaatgaagatgacaaaatcaacctcacagacttacaatcatgctcttaaaaacttcacacagttctttttttatatataagagaaatagaggtgggctagggctatgtttgaattcaaacacagacaggtacaggcaaatatctgatgttaatatgtacacagcatggcccatgtgtctgcatacagacaccagaatgcatgcacaaaaacatccatacgcttgtatgtagtcaacctgttgtgcacacgtacacacaaatgtgaatatgcacatttgttgaatatccacatctagctggacccagaaaagcacgtcatagacctcccccaagtggcatatcccaaagcacatgtgcactcaggcgacatgcacagacagacccagagactggcaagcattcaggaacagtggcatgaacacacatgcacctcatcaggtactcacacaaatgtgcttgggcagacataagttggaaaggatgcccacttatcaagcacaaacacacaccccacaaagcctggcgcatgcataaattcatctatcaacagggacatgctgaaacatacatgcacacagaaacctcaagcatgcacccagagtgacacacacacacacacacacagatgtataaataagggtaaaaatggcagaggcatctaggataaaccattggacaaaatgacacaaacatgcaaaaatgcacttgcacaaagggcagttgaggggaaggttgtcttgcagggaagaagaaagagaaagacagaaagacaagatcatagacaaggggagagagacaggtgggcaaagtcctatgcaggtctccaggccatctagaatagtatgagagtctaatgcttgcctgtcctcttgcagaaacttaaattggtgaatatggtaaattttatactatgtgggtttttttaaccaccatagaaatatataaatataatgaaatctgagctaatctccaaaaaaaaaaaggcacaatgtcacatatgaccaaaatctgcatatgctatcaggagctcacagactccctgagatccactgattaaagtttttttttgtttttatttttgttttatttattatttttattatactttaagtgttagagtatatgtgcacaacgtgcagggttgatagatacatctacatgcattgtgttggtttgctccacccattaacacatcatttacattaggtatttctcctaatactatccctctctcattcccccaccccacgacaggccccagtgtgtgttgttccctgtcctgtgtccaaatgatctcattgttcaattcccacttatgagtgacaacatgtggtgtttggttttctgtccttgtgacagtttgctcagaacgatggtttccagcttcatccatgtcgctacaaaggacatgaactcatccttttttatggctgcatagtattccatggtgtatatgtgccacattttcttaacccagtctaccattggtgggcatttgggttggttccaagtctttgctattgtgaatagtgcttcagtaaacataagtttcagtaaacttcttcctggtttagtcttgggagggtgtatgtgtccaggaatttatccatttcttctagattttctagtttatttgcatagaggtgtttatagtattctccgatagtagtttgtgtttctgtgggattggtggtgatatcccctttataattttttttttttttttttccaaggcagaagaatttttcttagtacagaacaaaatgaaaagtctcccatgtctacttctatccacacagacccggcaaccatccgatttctcaattttttccccacccttcccgcctttctattccacaaaaccgccattgtcatcatggcccatccccaatgagccgctgggcacacctcccagacggggtcgtggccgggcagaggggctcctcacttcccagtaggggcggccgggcagaagcgcccctcacctcccggatggggcggctggccgggcggggggctgacccccccaccaccctcccggacggggcggctggccaggcagaggggctcctcacttcccagtaggggcggccgggcagaggcgcccctcacctcctggatagggcggctggccgggcggggggctgaccccccccacctccctcccggacggggcggctggccgggcagaggagtcctcacttcccagtaggggcggccgggcagaggcgcccctcacctcccggacggggcggccggccgggcggggggctgacccccccacctccctcccggacagggcggctggccgaccccccccccccgcctccctcccggacggggcggctggccgggcagaggggctcctcacttcccagtaggggcggccgggaagaggcgcccctcacctccaggacagagcggctggccaggctgggggctgatccccccacctccctcccggacggggcggctggccgggcggggggctgaccccccacctccctcccggactgggcggcttgccgggcagaggggtcctcacttcccagtaggggcggccgggcagaggcgcccctcacctcccggacggggcggccggccgggtggggggctgaccctcccacctccctcccggacggggcggctggccgggcagaggggctcctcacttcccagtaggggcggccgggcagaggcacccctcacctcccggacggggcggctggccaggcggggggctgatccccccacctccctcccggacggggcggctggccgggcggggggctgaccccccacctccctcccggactgggcggctggccgggtggggggctgaccccccccacctccctcccagacggggcggctggccgggcagaggggtcctcacttcccagtaggggcggccgggcagaggcgcccctcacctcctggacggggcggccggccgggcggggggctgaccctcccacctccctcccggacggggcggctggcggggcagaggggctcctcacttcccagtaggggcggccgggcagaggcacccctcacctcccggacggggcggctggccaggcggggggctgatccccccacctccctcccggactgggcggctggccgggcggggggccgacccccccacctccctcccagacggggcggctggccgggaagaggggtcctcacttcccagtaggggcggccgggcagaggcacccctcacctcctggacggggcggccggccgggcggggggctgacccccccacctccctcctggacggggcgactggccgggcagaggggctcctcacttcccagtaggggcggccgggcagaggagcccctcacctcccggacggggcggctggccgggcagggggctgaccccccccccacctccctcccggacggggtggctgccgggcggagacgctcctcacttcccagacggggtggctgccggtcggagacgctcctcacttcccagacggggtggctgccggacggaggggctcctcacttctcagacggggcggttgccaggcagagggtttcctcacttctcagacggggcggccgggcagagacgctcctcacctcccagacagggttgcagcccagcagaggcgctcctcacatcccagacacggcggcagggcagaggtgctccccacatctcagacgatgggcggccgggcagagacgctcctcacttcctagatgggatggtggccgggaagaggcactcctcgcttcctagatgggatggcggccgggcagagacgctcctcactttccagactgggcagccaggcagagaggctcctcatatcccagacgatggggggccaggcagagacgctcctcacttcccagacagggtggcggccgggcagaggctgcaatctcggcactttgcggggccaaggcaggcggctgggaggtggaggttgtagtgagccgagatcacgccactgcactccagcctgggcaccattgagcactgagtgaacgagactccgtctgcaatcccggcacctcgggaggccgaggctggcggatcactcgcggttaggagctggagaccagcccagccaacacagcaaaaccccgtctccaccaaaaaaaaaaaaacaaaaaaaaaaaacgaaaaccagtcaggcgtggcgacgcgcgcctgcaatcgcaggcactcggcaggctgaggcaggagaatcaggcagggaggttgcagtgagccgagatggcagcagtaccgtccagctttggctcggcatcagagggagaccgtggagggagagggagagggagagggggagggggagggggagggggagggggagggggagggggagggggagggggagggggagggggagggggagggaatgggagagggagaggccctttataattttttattgcatctgtttgattcttctctctattctttagtcttcctagtggtctatgaattctgtgatcttttcaaaaaaaccaactcctttattcactgatttttctgaagggtttttgtgtctctatctccttcagttctgctctgatcttagttatttcttgccttctgctagcttttgaatgtgtttgctcttgcttctctagttcttttaattatgatgttagggtatcgattttagatttttcatgctttctcttgtgggcatttagtgctataaatttccctctacatgaaaaaatgctcatcatcactggccatcagagacatgcaaatcaaaaccacaatgagataccatctcacaccagttagaatggcgatcattaaaaagtcaggaaacaacaggtgctggagaggatgtggagaaataggaacaattttacactgttggtgggactgtaaactagttcaaccattgtggaagtcggtttgatggttcctcagggatctagaactagaaatgccatttgacccagccatcccattactgggtatatacccaaaggattataaatcatgctgctataaagacacatgcacacgtatgtttatagcggcactattcacaatagcaaagacttggaaccaacctcaatgtccaacaatgatagactggattaagaaaatgtggcacatatacaccatggaatactatgcagccataaaaaaggatgagtttgtgtcctttgtagggacatggatgaaactggaaaccatcattctcagcaaactatcgcaaggacaaaaaaccaaacactgcatgttctcacttataggtgggaattgaacaatgagaacccatgtatacaggaaggggaacatcacacaccagggactgttgtggggtggggggcggggggagggatagcattaggagatatacctaatgctaaatgacaagttaatgggtgcagcacaccaacatggcacatgtatacatatgtaacaaacctgcatgttgtgcacatgtaccctaaaacttaaagtataataataataaaataaaaaaaaaatttccctctacacactgctttaaatgtgtcccagagattctggtgctttgtgtccttgttctcattggtttcaaagaacatctttatttctgtcttcatttcgttatttacccaattgtcattcaggagcaagttgtttagtttccctgtagttgtatggttttgagagagtttcttaatactgtgttctaatttgattgcaatgtgatctgagagacagtttgttgtgatttctgttctttcacatttgctgaggagttcttcacttccaactatgtagtcaattgtggaataagttggatgtggtgctaagaagaatgcatattctgttgatttgaggtggagagttctgtagatgtctattaggtccatttggagcagagctgagttcaagtcctggatatcctttttaaccttctgtcttgatgatctgtctaatattggcagtggggtgttaaagtctcccattattattacgtgggagtctaagtctccttttaggtctctcaggacttgcttaatgaatctgggtgatcctgtattgggtgcatatttagaatagttagatctccttgttgaattgatcactttaccattttgtaatggccttgtctcttttgatctgtgttggtttaaattctgttttcttcgagactaggattgcaacccccattttttttttccttccatttgcttggtaaatcttcctccatccctttattttgagcctatgtgtgtctctgcacatgagatgggtctcctgaatacagcacattgatgggacttgattctttatccaatttgccagtctgtgtcttttaattggggcatttagcccatttacatttcaggttaatattgttatgtgtgaatttgatccggtcattatgatgttagctggttattttgcccattagttgatgcagtttcttcctagcatcaatggtctttacaatttggcatgtttctgcagtggctgctaccagttgttcctttccatgtttagttcttccttcaggagctcttataaggcaggcctggtggtgacaaaatctcttagcatttgcttgtctgtaaaggattttatttctccttcacttatgaagcttagtttggctgaatatgaagttctgggttgaaaattctttgctttcagaatgttgaatattggcccccactctcttctggcttgtagagtttctgccgagagatccactgctagtctgttgagcttccctttgtgagtaatccaaactttctctctggctgcgcttagcatttctttcttcatttcaaacttgatgaatctgacaattacgtgtcttggggttgctcttctcaaggagtatctttgtggtgttctctgtatttccggattttgaatgttggactgccttgctaggttggggaagttctcctgggtaatatgctgaagagtgttttccagcttgtttccattctccccatcactttcaggtacaccagtcaaatgtagatttggtcttttcatatagtcccatatttcttggaggctttcttcgtttctttttacttttttttctctaaacttcccttctcgcttgatttcattcatttgatcttcaatcactgatactcttccttccacttgaccgaattggctactgaaacttgtgcatgtgtcatgtagttctcatgccaacgttttcagctccatcaggtcatttaaggtcttctctatgctgtttattctagttaccattcatctaatcttttttcaatgtttttagcttccttgtgatgggttcaaacatcctcctttagctcagagaagtttgttattaccgactttctgaagtttacttctgtcaactcatcaaagtcattctctgtgcttttttgttccgttgctggctagcagctgtgatcctttggaggagaagtggtgctgtggtttctagaattttcagcttttctgctctggtttctccccatctttgtggttttatctacctttggtctttgatgatggtgacctacagatgtggttttggtggggatgtgttttttgttgatgttgatgctatccctttctgtttgttagttttccttctaacagtcaggtccctcactgcaggtctgttggagtttgctggaggtccactccagaccctctttgcctggggatcaccagcagaggctgcaatacagcaaatactacagaatagcaaaaattgctgcctgatccttcctctggaagcttcgtctcagaggggcaaccagctgtatgaggtgtcaatcggccattatttggaggtgtctccaagttaggctacatgggggtcagggacccacttgaggaggcagtctgtctgtctcagagctcaaacaccatgctgggagaaccactgctctctttagagctgtcagacagggacatttaagtctgcagaagtttctgctgccttttgttcagctatgccctgcccccagaggtggattctacagaggcaggcagccttgttgagctgtggtgggctccacccagttagagattcctggccactttgtttacctactcaagcctcagcaaaggtggtcgcccctccctcagccaggcttgccacctggcagtttgatcttggactagcagtgagcaagactctatgggtgtgggacccactgagccaggtgcggtatataatctcctggcatgccatttgctaagaccattggaaaagggcattgtttaggtggcagtgtcccaattttcccattacagtctgtcacaaaaatccccaactgcttgcactttgtgggtgaggcaatgccccaccctgcttcagctcaccctccatggtctgcacccactttctgaccagtcccagtgagatgaaccaggtacctcagttggaaatgcagaaatcacccatcttatgcatcattcacgctgggacctgcagaccagagctgttcctatttggccatcttggaacagctcctgattaaagttttcttgatcattggatatcatctgagtgggtggatggcttctctgccttgctcatatttatacatttcttccttcaggggcctcaaatccgtactgtcagggttatcacccatgttaatgattgatttatagggcttaagttagatttgaattaattccttcactgagcaacacgggtcctgtggatgattttcctataatcctgaggatcaggatctttgttgcaaaagaggcatgggcagcagtggcagaggtcctggtgagccatctgctcttaggagcatggatttcagtatgccaccaaatggctgcttttttccctcttctctctctttgtctcactttttgttttttgacggagacttactctgttttttaagatggagtcttgttcttgtcacccaggctggagtgcgatggcttgatttcagcttactgcaaactctgcctcctgggtttaagagattctcctgccttagcctcctaaataggtgggattacaggtgcccacgaccacactcatgtaatttttaaattttttgtagagacggggtttcaccatgttggccaggcttatctcgaactcctgacctcagttgatcaacccgtctcggcctcccaaattgctgggattacaggtgtgagcccttgcacccagctgtctctttctcactctccaaagattgctgtttcttgaatgactatccagtgggcccgtatattacaccaaatagagtcgttcacctgagtgctctatagattggggcccaatgcctggttgagacacataccagttggtggaaaggaagagtctttttcctgagcctagcatcattcacaggtgcattctaagatacacagataagtccaggctgagacacatgatccatggctatattaaagagggtcttaatcccatcatcctgtcttttaatgccaattaattaacaaaacttctgaccaaggtttactaagtctttaatggaggctcagtaggactcaacaatgaaatacaaggcagcacaggtcaaggcacaggctggctagaaggcagcagctgaaaatgcatgctaggtatcaggtagtggagtgggttagcaggttagcaagccaaagcaaaagaagaaagacccctggtgattgtagtcagaatctagcagctctgttcacagtgtcaattgttatggtcactcacagaagcagatggacacccacccaaaatttggaccaggtgtcaaaaccgatgatgccacacacacgatgagagggcatggaaagttttattgctcccataattgaggcctctagggagagtgggacaggcccttgatttctatggtggctaggggctgagggtggtgtgaaagtcctactgtactcctgcatgttcaggagcttgtgtggtttgaatcttccataggcaccaaaggagagagaacctgggctttctttattattattattgtcattactattattattattttaattgacacattataattgtacatatttatggagtaccgtgtgatgcttcaatacatgtgtacaaagtgtaaggatcacagatcccggtaattagaatatctatcaacataaaataatatgagagtgatatatcatcatattcataggtttttaagattattgcaccaaatatgaaatttcttgaaatatttcagtgaaatatcttgtgaaaccatttttagaaattttgcctaccttggtccaccctcccaccctcaaagattcatgtccctttcacatgcaaaatatattattcctcccctgaggttcctaagagttttgttccattacatcaattcaaagattaaaatcttatctgcatataatcagctcacaagtaccaaatctcgttatataaatccggtgtggatgaaacttctaggtataatttctcgacatctgtggaccctcagcagtgaagaaacaagttatctgttctcaatatacaatgatgagacaggcaataggataagagttatagacattcaagttcaagagagggaaaatggaagataaaaaggagtgcccagctcaaagcacttttgaaatccagatggaaaaactccagctgaagccccttggttaggtttcagggcccaggaaaacttctccatagtttttgatcctgtcctctgggcttttggctatgccctgtgtgtgctgttagtgctgctaaaacaaaatacctgaggatgggcaagttataaagattagaaatttatttctcatggttctggaggttgggaagtccaagatcaaggaaccagatggattggtgtctggtaagttctgctctctgcttccaaggtggcaccttgttgctgcctaccctggaggaaaggaatactttcctttcccatattattttacgtttattattattatactttaagttttagggtacatggatcttcaaggatccagaactagaaataccatttgacccagccatcccattactgggtatatacccaaggattataaatcatgctactataaagacacattcacatgtatgtttattgcggcactattcaccatagcaaatacttcgaaccaactcaaatgtccatcaatgatagactggattaagaaaatgtggcacatatacaccatggaatactatgcagccataaaaaatgatgagttcaagtcctttgcagggacatggatgaagatggaaaccctcattctcagcaaactatcacaaggacagaaaacgaaacaccacaagttctcactcataggtgggaattgaacaatgagaacatttggacacagggagcggaatatcacacagcggggcctgtcgtggggtgggagaatggggagggatagcatcaggagatatacctaacataaatgacgagttaatgggtgcaacacatcaacatggcacatgtatacatatgtaacaaacctgcacgttgtgcatgtaccctagaacttaaagcataataaaaaaataaataaaataaaataagaagaagaaaaaattaaatctaagtaaagcacttagaacaatggctggcacatagcaaatgctgtgttagttgctgttcttccaggccagaagcgacacagacaagttaccaccaggtggcgctgtattcctccagctccacaggttactcaggctcagagtctgggggtgcatctcaacagccctgaatttgaatcctgctctgccactgcctagtcgagacatttcactacatgcctagctgagacatttattagctctaggcctcattgtattcatttcatttcattacttttttttctttttttttgagacagagtctcactctgttgcccaggctggagtgcagtgtcacagtctcagctcactgcaaacttcgtctccagggttcaaaggattctcctgcctcagcctcccaggtagctggggttacaggcgcccgccaccacgtctggctaatttttgtatttttagtagagatggggtttcaccatgtcagccagcctggtctggaactcctgacctcctgtgatccacccacctcagcctctcaaagtgctgggattacaagcacgagccaccatgccaggcagaaagctggttttcttgagaggtgatgaagacttgaggctacgtcaatcatacctgagttagaattccagttccagcacctacaatctctatttcctttgataaatgacatcaccagtctgcccttcagttccctcctttagaaaatgagtattttaacaaaacctatctctgtataacatacagcaatcatgatgcctacaccatgaggattcagtgtgatactgtaggaaatcctttaacgcaaggcttggcacaaaaagacactcctatcaaccttaaaatattaagactaatattaaactaagacttgagggcttgttatatatcaggaacataacaccatgaattctcatagcaacatcatgagacagataatactgtcatgatttccatattatggaagagggaactgaggctcaaggagatgttacttgtggaaagtcacacatttgggatttaaaataaggcagcctgtctccagaacccatattactcaccattatgctagactggactccctcaccctcgtaacccatgttgtgtgcccaaaattcaagtttcttctgggcttgaggtctttgaacagctagaggtcttccatcccttccatcttctgtactggagtggatgattcaagaagtagaaaactggccaggtgtggtggctcacacctgtaatcccagaactttgggaggctgcggtgggtggatcacctgagttcaggagtttaagaccagcctggccaacatggtgaaaccccatttctactaaaaatacaaaaattagccaggtgtggtggtgcgcacctggaatcccagctgctcgggaggctgacacatgagaattacttgaagtggggaggttgcagtgagccaagatcacaccactgcactccaacctgggtgacagaatgaggttccatctcaaaaaaaaaaaaagaaaagaaaagaaaagaaatgaaaaaagggggaaaaatacaaaaccttctgctctttgaccatgcagattatgataatactgtagggtagtgatgctctgctgagaacatgcctcagaattgcctgcaggccttgttgaaacacaggttttcggtttctgatttagtaggtctggggtgtggtctaagaattcgtgtttttaacaagtttcagatagctgagtgtgtggtgtatgcctatagtcctggctacttgggaggctaaggcagtaggattgcttgggtgcaggaggtcgaggctggagtgagctgatattgcacgactgcattgcagcatgggtgacagagcaagaccctgtctgtctgtctaaaaaaaaaaagttccaaggtgatgctgatgctgcaggtctggaggctgcactttgagaaccactgaactatagcagagcaacgagtttgaaggaatctgggtccatgattgaccacaaggaggggagccaccttgccatgctggactaactgtctacttcaagagggacacaaaatagagaaagaaacttgtattttatttcagtgactgcattatgggatctgttggttacaacaacctggcctttaccttaattaatatagacatttttcaggctgttttcctgcagatgccctgatagatatctttgttcccaccagccttcagtgacttagccaacatctgtcagcaggtccagttctgtggattcccctcaaggtccagagcttgcttcctactttccttccttccttccttccttccttccttccttccttccttccttccttccttccttccctccttccttttcctttctctcttttcttttctttggcagggtctcactctgttgctcaggctggagtgcagtggtgcaatcacagctcactacagcttcgaactcctcggctcaagcgatcctccccgcttagtctcctgagtaggtggggctacaggcacatgctaccacccccagctaatttttttattttttgtagagacatggtcttgctatgtcacccaggctgggattacaggcattagccaccgtgtctggcttcagagtgatttttctacagcacaaatttgactgtgacttaccctactttaaatctcccatggctccaaaggctctaggaaaaagtcaaaactcctcagtgggacattcagagatttttctaagaatccaaaggacctctcatggtccatgtcccaaaatttcccccgatggaccctctgggctaaactttttctcttgttacctctagccaaacacaacacagttccaagcctcctgccctttcctcttgctgttcctcctccctgaggtgcctttcatggctcaggctgtggccaggatcagcgtggagtcagtagcttggatgggtggtccaggtccagtgctcactgagtgaccaggatctggtctcagaatgtgaccgaggtctgggtcagcgttcaggcggaagcaaggcttggggttcaggttgtccatttttcattttctcagaatatttactgacctgttgtcagctgatattttgagatatccaagccctgggccattctggcaccagatggagtccaagggctaggctaggatggctcctgggtgtcatagtcattgaaaggttcactgttgtattaaagaacccaaaacctcagtggggttcagtcacggggctccatatcagatctgagcatctgagtcctctgcccatccctggagccccaggatcccctccctgcttagttatcccagtgctccccctaccatcccacagctgcatttggtttattagaagggtggggagcagtaaatgtatttgaccaactcttgtgtaccaggtctagtacacacatgtcctcactgagtcttcaaaacaacactgtgggccatggacggttcctcacacctgtaatcccagcattttgggaggccgaggcgggaaaatcacatgagggcaggagttcaggaccagcctggccgacatggtgaaaccccatctctattaaaaatataaaaattagctgggtgtggtggcgtgcgcctgtaatcccagctactcaggaggctgaggcaggagaatcgcatgaacccaggaggcagaggttgcaatgagccaaaatcacaccactgaactccagcctgggcaacacagtgagactctgtcacaaaacctgcccccatcaaagcccccaaaaaaccctgtggaggagtgctattctcagccccattttatttttttaatttatttttgagacagtgtctcactctatcacccaggctggagtgcagtggcatgatcacagctcaccacagccttgacttcctgggctcaagtgatcctcccacctcagcctcctgactaggactacaggtgtgtgccactaagcctggataatttttaaatttttttgtagagaaggggtctcactgtgttgcccaggcttgtctcaaactcttgggttcaatcgatcctcctgcctcagcctcccaaagtgctgggattacaggcatgagccactgtgcctggctgcatcaccattttatagataaggaaacagaggcacagaggagtgaagacatttgctgaacttcacatcactagcggctgttccagaattcaggtagaacagttacttcagatctattctcctttgcatggccactccattctcattttacagatgagaaacggaggctcagtgaggggaaataggggaaatgtcttcattaggactgtacaggcaagggtaggatttgaacactgcattcctctttacagggcacagataagtacctgaggtattccagggctgtccaggtggaggcccttgccttggccacaggagtgcatggagtgggggtgatattagaacacaggtcaccgaagtgggtggatcatctgaggtcaggagttcgagagcagcctggccaacgtggtgaaaccctgtctttactgaaaatacaaaaattagctgggtgtgctggtgcttgcctgtaatcccagctactcaggaggctgaggcaggagaatcactggaacccgggaggtggaggttgcagtgagccaagatgcctccattgcactccagcctgggtgacagagcgagactccatctcaaaaaaaaaaaaaaaaaaagaacgcagttcagaagaattcctcaggagattaagggtccccacctgctttgtccacagagtttatgtccttctcaagaagggtgtgagagagatacacagagaaatgtctagggatacagggctcttttattgctagttttttttttttttttttttttttaagatggagtctcactctgttgcccaggctggggtgttgtccaggctggagtggagtactttagctgtggcagcccatcagtagctcccccagcccatgtttagctccctggacctgtctctagctccctccacctctctatgaatgtctatatctctccctgtgccaattacacattcctcaaacacttacagtgtgtcctccccatggcatattgagtctcatttccatcctcacaatgactctatagggtaggtgtattagttcattctcatgctgccaatgaacacatacttgacactgggtaatttataaagaaaaagaggtttaatggactcacagttccacatggctggggaagcctaacaatcatgacagaaggcaaaggaggagcaaagacacatcttacatggaggcaggcaagagacagagtgtgtgcagggaaaactgccctttgtaaaaccatcagatctcgtgagacttattcactatcacgaaacagcatgggaaaattcactcccatgattcaattacttcccactgggtccctcccatgacatgtggggattacgggaattacatttcaaaatgagatttgggtggggacacagccaaaccatatcattccaccccgacccctcctaaatctcatgtcctcacatttcaaaataaatcatgccttcccaacactccctcaaggccttaactcatttcagcattaactcagaagtccacagttcaaagtctcatctggtacaaggcaagtcgcttatgcctataaacctgtaaaattaaaaacaagttaattatttcctagatacaatggaggtactgccactgggtaaatacacccattccaaaaagagaaattggccaaaatgaaggggctataggccccatgcaggtccaaagtccagcagggcagtcaaatcttaaagctccaaaatgatctcctttgacaccatgtcttacatgcgggtcacactgttgcaagaggtgtgttcccatgacgtcaggcagctctgcccctgtggcttgcagagtacagccccgctcctggctgccctcacgggctggcattttgtgtctgtggcttttccaggtgcacagtgcaagttgttggatctactattctggggtctggacgacggtggccctcttcccacagctccactaagcagtgccccagcagaggctctgtgtgggggctccaaccccacatttcctttcttcacttctctagcaaagttctccatgaggactctgctcccttagcagacctcttcctggacatcctggtgtttccatacatcctctgaaatctaggtggaggttcccaaacctcagttcttgtctcctgtgcaccacagtcccaacaccacgtggaagttttgaaggcttggggcttgcaccctctgaagcaaacacttggccagctttagtcaaggctggagtggctgggaggcagggtaccaagtcccaaggctgcacatagcaggggatccctggagacattttccccattgtcttggtgattaacattctgctcctggttacttatgcaaatttctgcagctggcttgaatttctccccaggaattggggttttctcttgcatcttcaggctgcaaattttccaaacttttatgctctgcttcctcttgaatgctttgctgcttagaaatttcttctgccaaataccctaaatcatttgtatcaagttcaaagttccactgatcttttgggcaggggcaatatgccaccagtctcttggcatagcaacagtggcctttagtgcagttcccaacaagtttcccttctccatctgaaaccacctcagcctggacgttattgttcatatcactatcaacattttggccaaagccattcaacaagtctctaggaagttccaaactttcccacattttcctgttttcttctgagtcttccaaactgttccaacctctgcctgttactcagttccaaagtagcttccacatttttgggtatctttagagcagtgtcccactcccagtaccaatttactgtgttaatccattctcatgctgctaatgaagacgtacttgagactgggtaatttatagacaaaaagaggtttaatggactcatatttccacatggctggagaggcctcacaatcatggtggatggcaaagaagtagcaaaggcacgtcttatatagcagcaggcaagagagagcagcaggcaagcaagggaaacttccttttataaaaccatcagacctcatgagacttattcactatcagaagaacatcacgggaaaacccgtccccatgagtcaatcatctcccacagtgtccttcccacaacgtgtggggattatgggaaatacagtttgaaatgagaattgggtggagacacagccaaacaatatcactaggtatccatattttccagataaggaaactttaggctccaagctgagcttgcacttgcctgagcatctttagcacaacaaatgaatgacaaagctgggatttgaactcaggtatgtctgactcaaattagtcctttattctgacttcccagagtgtgcccctcagagccttggacctgagaaatagtgacgagtgctgtgatggaaaagaaaaagctgagaagccaaatagtccgcacagctgctgtcagccccctcccctcttgatgttattttaaaggcacataaacattctaaagaccctgagaagtcctgcaggtgagaaattggcttcctgtcatttaacccagtttctcccttgctatttacctgcagaatcccttttctccagaacttattctcttcctctgcctctcacactctctctctttctctctgcctcctactctttactatctctctctgtctccacattctgctgagagaggcatcatggggtagtgattaaaacagtaggctgtagaaccaaactttctgggtttgacaactgattctacctttagcctgctgcgtgacattgggagaagtctcaacccctctgtgtttcactttctccatccacaaaatgggggtgaaaacaattactacatcaaagggtgacaactaagtgaattactctattgaaagcacttcatgcctccttatcagtgctccccaagggtggaatgaggacccagagtacccgtattaggccatacttgtgttgctataaagactgtgccagattgcacaacacagcaggagacaggtcctggggtcaggaaagtccatggtggcatctttcctaggtcaggaaagtgtgggttgtactttgttggtcctctcctcgtgggttggggaagtatggggtgcagctgctcctggcagctttgactttcagcctcagataatgcattgcctgtgtctaatccacatggatgtggggtgactcagccacctccattccctgaatcagcatcttcagtggcggcaagtggtttgtttagctatgcaagcaagatgcagatttcccattttaaatgagaaaaaaagcagcaggcagagacagcagatgtggacacattcattcacatgttgggtgattagggactgacccctgccaggggcagggaggggacaggctcacagcagtgatggagacagacccaagcctaggggacatcaatcaaactggacccagtatctgtgcttctggatctcagattctagagaaacagagacacagaaggggatagaagagggtggggaagaggtagggggcaatgggaagagaggggggttgcattgatttgagatctttcttcttcttaaagaacgtttagttactgtaaagttcctctgtgagctatctgcaccccatgtttattgtagcatactcacacagccaatatatacaatcaacctaagtgtctatcaacagatgaatgaatggataaagaaaatgtgctatgcatgcatgtacacacacacacacacacacacacacacacacacaaatattatttagccttaagaaagaagaaaatcctgtcctttgcaacaccaggggtgaacctggaccatgttacattaagtgaaataagtcaggctcagaaagatatatactgcatgatctcacttttaagtggagtataaaaaagtttaactcacaaaagcaaagagtagaatgggggttaccaggagttggtggagagggtgaggagatgttgatcaaaggatacaaaatgtcagttaggaggaataagttcaggagatctattacataaatgggtgactatagttaataacaatggattgtgttaactatacattaattgaaaagcaattacttgaaatttgctaaatttgaaaattgctaagtggtttatgactcccacctgggggtgaagcaatgctccacagccactgaaagcaaccctgctctcctcaagagaccccgctgagcatctgctgaagacccgggcattagcccctcctgcctacctcagtcagtgcccacacacaattgaggggtctgaggacaggcccacctgatccagctccacccctctagtgcccaaacatgtcatacgggggactaggtatcatcctgctccatccaacacctttggcagctgagtatcaaagtaccaaagtactcggcacctgagtactcctcccagggaggaggtgggcccacccaacctgccgctaccaccatggctggcacccacctgcatgtgccaccagcaggcctggtgactggcctatccagcccattataccaccaaccacaaaagcatggaccattttggagctagaggattatcctgccacagctactgttcatgccatgtccaccacgcaggggcctgaggtcccacctaccagcccagcccaccattccactgtcagaacctgagaaagtcacctggaggcccaagaattggcccacctagatccactaacaccattgccagtgtatgctaccctcagacccaaggacaggcatactcaccatgctgctgccaccccttggcgcacctaatgtccccatctcagaacaactttaccacggcttccactaacaaccacaccctaagccaatggggaaatcacagacactactgacactgtttacagaggaagaaatcgtatgggaaccacactaatgcgtgcactcagagtcaaagtcaaagtgcccaacccaaccaacaccataggtacaacttcagggaaaatgtcctcccctatgaaagcagattcaaaaaattaaaagaagcaaccatgatcccaaatgcacagatatcaatgtaaagacacaagaaacatgcaaaagcaagaaaacatgacacccccaaaggaacacaataattctccagcaagagattctaaaaaaaattaatctaggccaggtgcggtatctaatacttgtaataccagcactttgggaggccaaggcaggtggatcacttgaggtcaggagttcgagaccaacatgcccaacatggtgaaaccccacctctactaaaaatacaaaattcgccaggagtggtggcacacacctgtaatcccagttacttgggaggctgaagcataagaattgcttgaacctgggaggtggagtttgcagtgagctgagatcgcaccactgcactccagcctaggctacagagggagactccatctcaaaaaaaaaaaaaaaaaagaagaagaggaagaagaaatccataaaatgccttaaaattcaaaagagtgatatttaaaaagctcagtgaaacacaagagaagtaaaaaaaatacaaaaatgtcagaaaattcagaatatgaatgagaaatttaccaaacagatcactatcatagaaaaaaagatccaaacaaattctggaactgaagaattcattgaattaaatacaaaacaaattcaaaagcttcaatgatacactagataaaaaaaaattaacaactacataacctgaagacaggtcttttgaaataactcagtccagaaaaaaataaaaaaataagaaacaataagcaaagcatatctgatatataaaacataagaaagcaaccaactattcaaattttgactatcccagaaggcaaaaaggaaacaaaagggatagaaaacctgtttaatgaaataatagctaaattcttctaaaatctatcaagagatttagatatctagatatacgaagttcagagacccctaggtagttacaatgcaaaatgttcttctccatggcacattgtattcagattgcttaaagtcaaagattaagagcaaattctaaaaacagtgagaaaaaagcatttagccatctataaaggagcccatcaacagtggatttgcaagcagaaaccttacaagccaggagaaaatgggatcatatattcattgagctgagttttcgctcgctctccaccactgctgaatgccgcctgcagacgtgccactgacttccacccgtccggatccagcatggtgtccactgatagaaaaaaactatctgcaagatactgtacccagaaaagttatactttgtaaatgaaaaggaaataaagtctttcccaaacaaataaaagctgagtaaatttatcatcactaaaccatacctacaagaaatgcttaaagggatcttacacatagaagcaaaaggaggatatctaccataaggaagcacacaaaatataaaacccattggtagagaaaacacacaaatgaggaagagaatagactcaaatggaagcacaacaacaacaaaaaacccaccaaactgttacaggagggtctttctttttagagctcccaagatggtgatgggccgctcccagatggggcaggccacttccaagatggcagcaagccttttgttctctgagctggggttcttggcctcatggattccaaggaattgaaccctgggccatgcagtgagtgttatagctctattagaagccatgggtcatggaagagaaccgtggaacccagtgactagtgttcagctcgattagaacaaacccaggcacttagccatggaagaacagtggtgagcctttagcctgattgggagcagcaatgggtgccttgctgggtcaggagtgcagcggacaccatgctggatctggaggggtggaagtcagtggcacatcggcaggcggcattcagcagtggtggacagcgagcaaaagctcagctcaagctggaacaaacatggaccagaagagtgtgcattggcaagatttaatagagtgaaaacagagctccaatacaaagagaggggacccaaagggggttgcccacccctggctccaatgcctggggtttatatcccaatcattgtccctctccctgtgctctcagatgatagatgatttgactatttctttacctcctacttttagcctaattggtattttagtgagccctctttactacctgattggtcaggtgtgagctgagttacaagacctttgtttaaaggtgggtgcagtcaccttccccagctaggcttaggaactcttagtcggcctaggaaatccagctagtcctgtctctcagtaccccctctcaacaggaaaacccaagtgctgttggggaggttggccaacaactgtactaacttctttctgctgaatgggggcataataggggtcatgcagttgagatttcctcaggagggatgtctttgatgtcatcaacattggagcatgggctaggaggcagatccaggggtctgccgtagatcttagccatggactgcacctggggctccgtttgaagaactatttgtagttttacagcttcaattctggaagagacaaacttaacaaggaggttaaagacacagggattgaaatgtctggcctgaagtgcaggggattatttctttggcacacttcacaggccctgactacctgcttgatagttttgaaaaggcctggtccagcaaataatgatttggccattggatgggtgctatcaacgcctaaatgaaaggtttggtgaagggttttaagtaatttccattggttagctgcaggcaaaagtatttttccttctttggtggctagacatcctgaggggagggaactatgtccttgtgaggtaccccattctatttcttctgctgagcactggggcttggtttcctggaggggattaccccatactagggttccttctataagcatttctaatggagggtcccgccttgtggctctttggcttcaatatctgcttggtggttcccttctatttccctttcctttcctttctgatgaccccagcagtgtaagatggccacctctttaggtttccgtacagcccataataactcataatggcttcctgatgtttaataggtgttccctcagaagttaggaattccatttctcaccatatttttgtgtaggcatggaggagaaggtaagcataattagagtgtttatatatatttacccttttcccttctcctaattctagtgtatcatggcccctgcttttgctaggatgtctctccctaacaaaggagtggggctttcaggcataattagaaaggcatgtgaaaagagtaaagtcccccagttacaacttagtggctgggcgaagtaactagtgactgcttgtcctaggacccctcggatagtaacagatctggaaatccagctagtcctgtctctcaaaactacaatgataaacaataagagaaaaagaaaggaagaaaggatatacatacataaagaagccaactaataatatgacaggattaagctctcacatatcaataataaccttgaattaaatggattaaactttccacttaaaagaaagagactggctgaatggatttaaaaagcatgacccagctatatgctgcctacaagaaacacatctcaccaggaaagacatatatagtgaaagtaaagaaatgagaaaagatattccatgcaaataaaaaccaaaagtgagcagcaatacctatgtttataaaggaaacagactttaagtcaaaaactgtaaaaagagacaaagaaggtcaatacataatgataaaaggatcaatcgagcaaaggatccatgaggaaattcctgcctaataaattttggtcagaccggttgtctgctctcaaaccttgtctcctgataagatgttatcaatgacaatgcttgcccgaaacttcattgcaattttaatttcaccccggtcctgtggtcctgtgatctcgccctgcctccatttgccttgttatatcttattaccttgtgaagcatgtgatctctgtgacctacaccctattcgtacactccctccccttttgaaaatcactaataaaaactttctggttttacggctcagggggcatcatggaacctgccgacatgtgatgtctcccccggacccccagctttaaaatttctctcttttgtgctctgtccctttatttctcaggctggccgacacttagggagaacagaaaagaacctacgtggaatattgggggtgaattttgcccgatatctggctgaatttcccctgataatgccactctctatgtccatgtgtacacattgtttagcacccacttatgaatgagaacatgtgatattcactttctgtgcctggcttgtttcacttaagataatcccctccagttgtatccatgttgctataaaagacattattttattcctttttatggctaaatagtattcaatggtgtatatataccacattttatttaaccattcatctgttgattccctatttttgctattgtaaatagcatttggaccacatttcaagtacttaattagtggccacatgcagcaagtgactatcacattggacaatgtagccccaacccactgtatgaccttgggtaagacttgcaaactgtcattgcttcaatatctccatctataaaatggggatggcaacaatacctcactaagagtgtaaagactgagttactgtgtgtaaagcacttcacgcctccccatcggtgcttcaccctggggctgcaatgagcacccaatcttagtgtcagatgacacagcacagcaagaccgaggcccttggttcaggaaagtccatgctgccacctcttcagggtcaggaaagtacagtttccacctcttacaaataggactgtttgtctgctcctcctgggtcaaagtaacttcgggttcaggtcctggatccagcaaagggtttgcttaacattgcaagaaagatgttgcctcatggtcaaaagtcaggcgtaggatgagacaggcagacacgcacacattcacacccacgttttgcaaagatggactgaccctgtcagaggatgtgtgggtgaaggtgcacagtgaggatagagacatatgggagtccagtagacatcaatcaaactggactcagtttgcacacacctggagctcaagagtctccagggggaaaacagagacacaaagtcagacagagagagagccagagaaatttcctgcaccgtgaagatagtcagaggcagggaagaaactccttagcactagttagagtgatcagaaaccaagaggacctgatcgctgtacctgccaggtctcagtttctgtctccttccaactgaccacctcttcctctgagactcaccagttctgcatctcttgctcctccttctgtttctccgaccacttccacctgtggctgtcacagaagggcggatgaaggaggggacactggagatagactcagcatctgcaggcttccaaagagaggggctaggagatccaccaacacaccagcacaaatacaccagcacacacagatacacacaattggttcatgtattgctaggttacagtttgctatgctacaaaggcagtaggccaaatttgattgaattgaataattccttattttcatcagcttctcctttttttttttttttttttttttttgagatggagtattgctgtgtcacccaggctggagtgcagtggtgtaatcttggctcactgcagcctccacctcccaggttcaagtgattctcttgcctcagcctcccgagtagctgggattaaaagtacccaccatcacgcccggttaatttttgtgtttttagtacagatggggttttgccatgtgggccaggatggtctcgaactcttgacctcaattgatctgcccccctcagcttcccaacgtgctgggattacaggtgtgagccaccgcacccagccagcctctcagttttgaacatgcactaccaccacctccacaacacacaaatgtaaatgcactttcgtatataaaactgtataaatacaaggaagctcatacacatgcaaggatacacacataagcacccccagattcaaccacagaaatatacgccagtacatttgcataaattcaaacacccctttacatgtaaaaatcatataagcacatacagggatgcaagcaggcatggacaaatgcatgcaagcacagacaaacagacaaagctaagtaaaaaagtgcaagctcacctatgcttacaaaaatagacatacatatacccacaaacccacacacccacacattcacttgctcacctggactttgatatctctaccactgtatccctgccaatatctacagagtgggtaaagggataggcatcaggtcactgggttgcccaagcaggaagtctgggttccctaacaactttttctaagctaatgctcctggatgatgatgaaaaaggaggtggggaatggatgaaattttataacagggtgcagaggcagggtcaggataaaaggcccagttggaggctgcagcagggtgcagggcagtcagaccaggaccatggaactcagcgtcctcctcttccttgcactcctcacaggactcttgctactcctggttcagcgccaccctaacacccatgaccgcctcccaccagggccccgccctctgccccttttgggaaaccttctgcagatggatagaagaggcctactcaaatcctttctgagggtaagacacagacgaatggggtctgagggtgagctgcttcttgccttggtacttggggaagcttcaccaaacagaatgaggcagacttccagagtcaggggtggcacgggcatggttggtgagtacggagcatggtgaagcatgatgggtggtattattaggagaaaagcatcaaattaaatttagcagagtttatttgagcaaagaagtgactcatgagttggacagctccctaaaccaggaaagacaccacacggcagtatggtcaagtggtatttacaggcagaaaaaggaggtgacatacagaaacagcctgattggccacagatcacagcttgccttacttggtcacaatctgagcagtttgcagcctgtgtggactgaaagcccagctgctctgattagccaacacttggctacttgtcacaagaatatattcatttgggccaggtgcagtggctcatgcctgtaatcccagtgcttttggaggccgaggtggtggatcacctgaggtcaggagttcgagaccagcctggccaacatggtgaaaccttgtctctactaaaaatacaaatattagctgggcatagtgatgcgtgcctgtaatctcagctacccaggaggctgaggaaggagaatcacttgaatccaggaggcagaggttgcagtgagccaaaatcttaccactgcactccatcctgggtgacagagtgagactccttctcaaaaaaaaaaaaaaaaaaaagaatatactcccaagttaggttgcagttcactctacagagagagctttaggtcaaatttaatttaattaaacaattctccccttttggtcagcctcaaaattttgagattgaccaaaaccttgggcatcaacattacttctgtcaccatcataatggacttgtctgctctcagtatggaattcacaatggacaatgtcaacgtagttgagtgattctttaccttttcttcatgtttttgttgttcccactgtaatgagcccactggatgtacaaagaatggctgcatatgagcatttaagactctttttttttctgagacagggcctcactctgtcagccaggctgaagtgctgtggcatgatcacgtctcactgcagccttgacctcccaaggctcaagtgatcctcctgcctcagccccccaagtagctggaactacaggtgcatgccaccacgcccagctaatttttgtattttttgtagagacagggttttgccatgttgcccagactggtcttaaactcctgggctcaagcaatccacctgcctcggcctcccaaagtgctaggattacatgtgtgagccaccgcacccggccaagactcttgagaaaatacaacacatcagggagactgttatgatggctctcaggagggtaatacgaagaaaatgaagtcactgggcctgtaataaactttgaggaatgtggacttgggggtatagataaggtccactgtccacagagagaagaaaggctgttaatagtctcttttaacttgagtgtgtccatgaaccaaactgatcaaaatcgaataattcgaagttcagacaataaagatagttcaatagtattagagtccaattggtcatagattttgttcagggcatgatggtaattaaggaccagagcttgctataaaataacttgatttatagagacattcatttgtagttggcctggtaacatatagtatcctggagacccactagaagaaacattaagagtagaaaagtttgggatagccaggcttgctgtgttagtccattctcacactgttataaagacatacctgagactgggtaatttataaacaaaagggatgtaactgactcacagttccacatggctggggaggccccaggaaaatacaattcatggcaaaaggtgaatgagaagcaggaaacttacaatcatgatggaaggtgaaggagaagcaagtaccttcttcacaaggtggcaggaaaaagagagagagccaagggggaagagcctcttataaaaccatcagatcttgtgagaactcactcactatcacaagaacagcatgggggaaaccgcccccaggatccagttacctcctactaggtccttccctccacacctggggattacaattcaagatgagatttgggtgaggacacagagccaaaccatatcacttaccatcaccattcaggatgcttgcaaaccaactgctagctgcacctgtaaacacatatctgtttctttcccctgagaaatgtccttagtgtatttgtggcagtgtctagagaaacagcagtgtcagccgcattttaaattaagttatctgcactagtgaattcactggaaagataagagcaatatttggttttcttcagcaccatacacaagcctccaagatgggcatagaggagatctaaaattgcgtgatgttccattaagcgtttttgttgccacaaatgttctcatctcagtttggagagtggcttctacccatctgaactccttggaggttcaattagctgcaaaattcaagatgtcccttaatgtataacttagcctcagattccatacaactgtcacccaaataccaccaagaatgagcacccaggaacccaactggaaccttttctgaacagaaaccaacttatcttcgtcgattttgaggttgatagtaatttcagttattgactgttttggcttttaactatgggaggtattaggaaactctcagggaaacaatttggaaagcagcagtgagctaggccaaatagcaagttctggacctgtgaggagaaagaacagagtaagcaaacctcaagatactcaaggtaggcactcgtggtgttggaaaagagggtcacctactggcattagagcagagatcagttagatttgtttacccataagtctgcatagctcctgaacaaggtgggaaacttacttttttgtggtctttttctagcatgctgcgaaggtgcataaccacatttagttggaaagagactttactgtatttacttatttatttgtttttaatagagttggggtcgtgctatgttgaactcttggcctcaagcaatcctcccatctcaatctcccaaagtgctgggattacaagcatgagccaccatgcctggccactttacatatttaatccagtaacattacacacgcaattgcccacacccccataggtagtccccaggtcttgcatacgggatgcctggaagcaaaatatgccttttgcagccattattcagatacatttcctatatttagtagtgattatgttattagctagttaatagtatgttattacgtactgttattatattaactaactaataacataatcactactaaatatttccagtgagtgcaaaaaagcaagtggcaatgatgtctagaatatcaagatatagctttccactcctcctttggggtttctgggtgattctcattgggaacatgaagaggcattggcaccagtgaaattatttcctgattttggggcgttggttcagaaactcaacaactccttgttttttttgtttgtttgcttgttttgctagagtataagcctttgctaaagccattcacagattatagtcctatggattttcttgtaaggaaagggaaagggttaggacagcaagaaatggggaagaaaggataaaagataatgctttcatgatggaagagaaatcttgatccacaatcttggaaaagctgtccgcatataagatgccaactgcttctggggaaaaacttccctggtcagctttgccttaaggtctccaacagacatacagttctaggagtctagaagggtcctttccaatggagagatgtggatccaagatccgagaccctgacattttgctacagagaagaacttggcattgtccttcccaatggagtacaaggaacagtcttagaagaacttggtacggtctcttccaatggagttcaaggacagtttgtctggtgtcatttccaaagggcccaacctctaaattctagatcatgaaaggtctggttgtcatcaaccgatgtgtcatcaatgactcattttacctggtgaaaacatgctttggcataaagtattatagccttgcattattgagtcatatcagagtttataagagtgggagatacatgagattctattattaggggcataggccctctattactattttacaagagatctatctatgtctttccagtaggagtggatctgattgccatcaatcaataatacctgagaccaagggactccaatcaattcagcatgctttgcctaatgatatttgtttgtaatactgttgcgggacaatcaaagactggagagaccaaaaaaggttcaggagagtttattaaattaaggtgatcaccggttcagccagacatacatccagaaagtctgagccccgaacaaaggcttttcctacttttaaacatattaaggtgggaactacatgaggcaggaagccagtttcagaagtgagaaacaaagcagttaaataacatttcttacatcttgagaaagacatgtcttgcaacctaaccttatcggtccggtgaccctgcagctgtgcaggaactcactgggcctgtaataaactttgagggatgtggagttggggagtataggtaaggtccactgtccacagagagaagacaggctgttaatattctcttttaacttgaatgtaaggtgtggtcatactttgcagcaaccttaagaggattttaaaatttatattactactactattaggttatagttgatttcattaattccttcttcaataccttatttaactgttttaccacttgtctagtgaaacaagtacctctgtcactggagagttctccaggaatgcccagtaaggaaatacattttctaataaccttttatctacggttatggcattgattgatctttgtgcatagaaatgctttaatacaaccagaaaacatgcaatgaagctggcagttgaattaactccagcttcaagtgttcaaatgatctaccaagtgccagaaatatatcacctgaggtttttgttgtcttactagaattatggatttgataaaccaaatattagttataaaccatttagtaatcttagaatagtcacctcatcaatattttttcactgtttggatcattttctctcttctatgatgagtcatggaatacggagcttttagtaatggaaattttaagaactcaggaaggaccaggcggccatctagggtctccatgagtgcatgcttcacattggaattacagactctaaagtacaaattttaatacaatgagttgcaatttatgcttctctaattcaggtacataacactggtttattaaataggttatcataggtaatttgatggtgccattgcactccagcctgggtaacagattgagaccctgtctctgaattggaactgcacgggggcactgtccttggaggggtgaatgggcatgaagaggtgtctgggtatgagccacaggtatagaatttcactcttctctgccatcctctgttacatcctgggtacctgcctgccactgaaagaatgaggtaaaagaggtggtggcacgaatcaaatagatcttgctgtgccaatgagagagagcagactagcccatgtcagtgccaggagagtggaggagagagggagagcaggagaggagtgtgggtagggagtgctcatcaacagtacacatagtgccctataccggtaactgccactggctcagtatttacctgggttatcactgcttaccatgcctgattttatgattaattatctacttatcattactaatccatcaacccactttccaatgggagaattagaacactgacaataccttccagctcctcttccccttccccctcccatgttgaccatactcctgaatcttaggctcgttatccttttactattaatagagttatttttttaatttctgatcaatggtctttttaatgataccaagtacagagtatatatgccaatactactatgaatttttaaattatttgctcagacagaatacatggacatacaaatgatgaatgtgataattgtcatacatatatatttatcttagacacttagtcaaaacatgtggtctttggttatcagttagacactgtcactttacctggaagatacaaggtaattggtcacagactctcaaattatgaaacatttagatttttcaggggaatgacatggagggagccaaggagtcttatgattagataagatgttgtttgggtggctcacgacaccactgggcaacactcaaagaggtggtggcttatacctgtaatcccaacactttgggaggctgaggtgggaggatcgcttgaagccaggagttagaaaccagcctgggcaaccaaacaagacctggctctacaaaaaagttttaaaaatttagccaggcatggtggcatgtgcctgtagtcccagctacttgggagactgaggcaggaggatgacttgagccttgtagtttgaggctgcagtgagctatgatcacgtcactgccctccagcctgggcacagagcaagaccctgtctcttaaaaaaaaatcatctgcaatgtgaggagtgataacatttaggaacgtgtgtataggtttaaatgctggtcaaagacatcctacacaattcgctgaaccttctctctaagggttttttcccaagctctgcagacgctatctgggcacaaatcatgcctctgttaacagaatttgctgttccttctagctcttggtatcccactgcccgctttctttatgaaagctggtatggtcattgaatatcccaatcctttacaaatttggaaacaagcaaaactgtcaatgaaatttgtatttgcctaaaatgagttttctttctttcttttttattattattatactttaagttttagggtacatgtgcacattgtgcaggttagttacatacgtatacatgtgccatgctggtgcgctgcacccactaactcgtcatctagcattaggtatatctcccaatgctatccctcccccctccccccaccccacaacagtccccagagtgtgatgtttcccttcctgtgtccatgtgatctcattgttcaattcccacctatgagtgagaatatgtggtgtttggtttttttgttcttgcgatagtttactgagaatgatgatttccaatttcatccatgtccctacaaaggacatgaactcatcattttttatggctgcatagtattccatggtgtatatgtgccacattttcttaatccagtctatcattgttggacatttgggttggttccaagtctttgctattgtgaataatgccgcaataaacatacatgtgcatgtgtctttatagcagcatgatttatagtcctttgggtatatacccagtaatgggatggctgggtcaaatggtatttctagttctagatccctgaggaatcgccacactgacttccacaatggttgaactagtttacagtcccaccaacagtgtaaaagtgttcctatttctccacatcttctccagcacctgttgtttcctgactttttaatgattgccattctaactggtgtgagatggtatctcattgtggttttgatttgcatttctctgatggccattgatgttgagcattttttcatgtgttttttggctgcataaatgtcttcttttgaaaagtgtctgttcatgtctttcgcccactttttgatggggttgtttttttcttgtaaatttgtttgagttcattgtagattctggatattagccctttgtcagatgagtaggttgcgaaaattttctcccattttgtaggttgcctgttcactctgatggtagtttcttttgctgtgcagaagctctttagtttaattagatcccatttgtcaattttgtcttttgttgccattggttttggttttttagacatgaagtccttgcccatgcctatgtcctgaatggtaatgcctaggttttcttctagggtttttatggttttaggtctaacgtttaagtctttaatccatcttgaattgattttgtatactaaaatgagttttcaaaaggatctttgtggctaccttattagttcatagaaagtggaggcttgtctggaatgatattaaagaatttttttcattttaattgttttagagacagggtctcagtctgttacccaggctggagtacaatggcacagtcatagctcactgcagccttgaactcctgtgctcaggagattctcccaccttagcctccagagtagctgggactaaaagtgtgagccaccatgccccactatttatttttgtagagatgtgtttgggggacggtctcactatgttgcctaggctggtctcgaactcctggactcaagcaatcctcctgcctcaacctcccaaagcattgggataagttttgcatagacatgtttgaccctctcccttcctttattgcagcaaagatttccattttctcacagggaggacttggggcaaattgtttttgtcgttgttattgttatttgaggatgtgggtgggtcatcttggttaatgtcagtgcaagaacggtgtctgctcctcattattggggttccttagctattcaggcaggcagcagctcccttgagaagacttcctgacccccaggtccccatcatatgctctcatacaccagctgcccctccttactgagcctatgtccttgatagtgctgcatttacctgtgatcctgtggctgagctctccctcacacttccagacaaggaaggcctgtgaggtatcagcacagtgctgaacatagtacctggtacacaataggcatttagtaaatatgtgaacaggaacaaatgaaggagtcagtgagtgaaagctccaagcctgactcagcggaactggcagtcggccagggcctacaaagtgctgcctggccctcagtagggggtggcagatctggggatccctcttcaccaaatagagttgcatcatacaggtaaaggtcccaagtgcctattgttttcttttcatcattttccatgtgtgacaagagtatcacgcaatcatgtgaatcaatggacttagttttctcactagactaatgtgtctaggaattatctgtgttgtcatggggattttccaggtgtcatttacaactacctgtggacaagatgaggtgctaccctcatcttagaattagggatggtggctgggcatggcagcccatgcctataatctcagcactttgggaggctgaagcaggtggatcaactgaggtcgggagttcgagaccaacctgaccaacatggagaaaccctgtctgtactaaaaaacacaaaactagctgggcatggtggcacatgtctgtaatcccagctactcgggaggctgaggcaggagaattgcttgaacccaggaggcggagtttgccctgagctgagattgcatcattgcactccatcatgggcaacaaaagtgaaactccatctcaaaaaaaacccaaacagaaacaaacaaacaaacaaaattagtgatagtgatgctcagcctggggaaagcatttgtccagtggcacacaactgggaaaaggggaagctgagatccagcaggaggtctgtctccaaagccctcctagactaaagctgcttaacaatttgtggattatgaaattctcatagagtttgattaaagctgtggccccctcttttccaaataggcacatacatgtttgcataaagttgtgaggcttcacacactccctaaaactctttcataaaccttccaaggatcctctaggtattcacgaccatctattatgattgcatctcttgggggtggggtaaagagggagggcatgagcaagtgtgcatcagggctgaggaaggtggcgctgttgcttctccatttcccaataagcttccagattctttttgatgtcagagggatgtgggctcgtgtctcagattcaacccgtatgcattgagtcacagttttctcttccgtcagttaagatcatgacaatgagaatgtgtgcccctaaggtggttgtgaggattaaatgggatattgcatacagctagtatataataagtgctcattaaatggcaactaccttgatccactcattcatttattcacgaatccaataacaattcactgggcactttctatgtaccaggaaatagtctaggaattgatgatgtggcatcttggacaagacatacgaggtcactgcgcttatggacattccattggcagagacagataagcaaaaaataaacagataaggaaatgttaggtggagaagagctacaattaaactaaagcagggggatatttcagacagtgatgagaactacgttagattgagtggttaggggaagactgtcttgtttttttttctgagcagagacaatgaaagattcaggtggaaggcactagaaggaggcaggggtggctacaagaatcctgaaacaggaaaaatgtcagagaacaacatggaggaatgagtgggaggagaagtcagagcggtaatagggccacgtcatgtaggaccatgtgaaccctcagtggagacttcagatcttattctcagcaaagtgggaatattgtaggccttggtgagcacgtggatattaattattttacattttagtggggttaccctggcttgtggggcagtgaaacaattgttaagtggagtaagcatgtcatccagaagtccagtgaaggggctttgcagagatcaatgcagggcatttgtaagtaaacttaacaaattttatgacttttatgtcaagtttttattgaacttgaacatcactgtaaaaagcgcacagctcaatgaattttcacaaactgaacatactcatgtaattgacatgcaggccaagtagcaagaatgccccgaaaccctgcaccctgttcttttctattcactatccacctaccatcttgatcatgggttgattttatctgtgtatgaacttcttttttgtttttgtttgtttgttcctgagattgaattttgctctgtcgcccaggctggagtgcagtggcactatctcgcctcactgcaacctccgcctccccgggctcaagcaattctctcgtctcagcctcccgagtagctgggactacaggtgagagccaccatgcctggctaatttttgtatttttagtagagatgggttttcaccatgttggtcaggctggactcaaactcctgacctcgtgatcagcctgcctcagcctcccaaattgctgggattacagatgtgagtcaccacgcctggccctgtgtttgaacttcatacacataaaattatgatgcattgactcttttgtgcctagttgcttccactcaacattatgcctgtgagtttcagccacgttgtcgcctgtagctgtggtttgttcttttttgttgctgtatactagtctattgtgagaaccctcactgattgtctatatctatattgatgagcattttattaagaaagcttctgtgaatattttgttcattttttggtgaacacacatacacatttttgctgggcatgtacctgggagtgaagtggctggtttcctgggtatccatttgttcagcttcaggaaatactgcccagcagttccccaagtggctgcacagtaatcccaccttatccactggagatatcttctgagacccccagtggatgcctgaaaccccacataatactgagcactatgcatactctttttttttcctatacaatcacattatatagggagggtggtatacacagtgcagacatggtggacaaaggatgattcgtgtccggggtgggacagagtggatggtgagagatatcatcatcctactcagaatgatgcacaacttaaaacttacgaattctttatttctggaattttccatttaatattttcagactgcgattagctgcaggtaactgaaactgcaaaaagcaaaaccacagatcataagaagtatgcggtgggggtgatattcatcgtattttatcaaccatctttactgtttagggcacaagccaatcagagcagaccctggctgggccacccattaacctaagcttgtccaacctgccttattttgttgttgttctgttttgttttgttttagctttttagcagcctgaagccatggttttcagtttctgtctccagtgatacacagaaaggaaggatgaggaaggggctttactggcccaaccagaaacggaaactaagaacccatgactgtattctctcccttggacagcgttaaccattaacccttaattgctgggtcccagcaggggaaagggcagcctggggaggcggatgttggggaggggctaattaccaatctggtatgtaagtattttgatagttttacaaatgaggtgtatgctgactaacagccacccctggtgtggatgtgattggcagttccgagagaaatatggggacgtcttcacggtacacctgggaccgaggcccgtggtcatgctgtgtggagtagaggccatacgggaggcccttgtggacaaggctgaggccttctctggccggggaaaaatcgccatggtcgacccattcttccggggatatggtgagagcctcagaggcactgggagggggcgggtggggggtgcatcagggaagggagtatatgggaggaagaaggactcagagccttcttccaacttcttctacaaccaacccacacctcccctgcaccccaggtgtgatctttgccaatggaaaccgctggaaggtgcttcggcgattctctgtgaccactatgagggacttcgggatgggaaagcggagtgtggaggagcggattcaggaggaggctcagtgtctgatagaggagcttcggaaatccaagggtgagtcctgggggatgaataggaaagaaagacaatgaaacactgagagatgcaggtgcacgggaatagaaagacagagaggtatataagggcacagacagagacagacgaaactggagacaccatcagacagagggatagagacagagagggagagagacaggggaatagagagggatggggatgggcaggagagaaacacagagagccagggaaagagagagatgccaggtgtataatgtccaagagttactcaaagaggctggatgtgatgactctcacctgtaatcccagtactttgggaagctcaggcaggaggattgcttgaggccaagagttggagaacagcctgggcaacataatgagatcctgtctctacacaatatagaaaagaagtgagccacgcatggtggtgtgtgcctgtagtcccagctactcaggaggctaaggtgggactacaggatcacttgagcccaggaggttgaggttgcagtgagctgtgattgtaccactgcactccagcctggacaacagagcaagatcctgtctcaaacaaacaaacaaaccctcaaagacatataatttcatggatcaattgtgtctgtcaaagtcaaaaacggaagttaagtaaaagaaaaaaactacagacatttaacaaataatgaactgtgttttccttgccctgggtgaagtgctgatgagctggcagtgagcagacaggccaggtggggtgttctgcccgggtgcagctggaggggtcatcaaagaatcactaggttatttttgagttctccataacttggtgtctgtgagacatgtaggtgaagggtctctggctagcacctccatctcattcatgccaggtgtttaccatctctcttatcaaaatttctcaagagactctgggatgtaaatgcagaggctgcatggggaggtagagacccaggagctatagggaaacggggacaagaagactgaagagaaggacaggaagaaacagtgacacaggcaggaggaaagagacagatggagggaccaaaacaaaaaaatataggttgggtatggggctcatgcctgtaatcccagcactttgggaggctgaggctggcggatcatttgaggccagcagttcaaaaccagcctggccaacatggtgaaaccccatctgtgctaaaaatacaaaaattagccaggcttggtagcacgtgcctttaatcccagctactcaggaggctgagacaggagaattgattgagcctgggaaatggaggttgccgtgagctaagatcacactactgcactccagtctgcatgatagagtgagactctgtctccaaaaataataataataataataaaataaagaacggcaggggggagacaaatatacacacagagagacagaaagaaacaaaggcaaagagaaattgaggcagagaaaattagagagacagacagacaaagcttaggaaaaggtctgcagaggaatgagagaagacaggcaagtgagaaccagagagaggctgcactaacctgatgttcttgggtccttacagaccactctccctccagctggggccagtgctgagcctggtgtatacaggtatcacttaacaagtacagaataattcccagaagactggagagccctagatgtggaaagaagagattaagggggagtaataggtaggggtggaaagatggttttttatttgttttaaattagagacggggtctcactctgtacccaggctggagtgcagtggcacgatcatagctcactgcagcctcaaactcctgggcccatgtgatcctcccacttcagcccctggactatttcaactgggactacaggcatgtgccaccatgtctagctacatttttttttttttttttttgtagagacagggtctccttatgttgcccaggctggtcttgaattcctgatccttttgaatcaggctcccgaagtgctgggtttagaggtatgggcccctgtgcccacccagggctttttaatttatataagcaattgattgaacacctactctgcccagcccctatccctgggatttaactgtactcactcccagagtcagaggtggggcctgagaggaggtgcagagtgagaaccggctgcatggactctatagctgtgttgcctgggtctaaatcctggcctcagtaatgagtagctgtgcaactttggtcaaattactcagcctctcggtctgcccatctataaactggagctaataatcaaattgcatctgcctcacattgttgtagtgagagttcaatggaattacgcgtgacgtgctggtacataattagctgttacggttattctcatgtttaccattactgagtgatggcagacaatcacacagagataggtgacagcctgatgttccccaggcacttcagtctgtgtccttgacctgctgcttcttcctaggggccctcatggaccccaccttcctcttccagtccattaccgccaacatcatctgctccatcgtctttggaaaacgattccactaccaagatcaagagttcctgaagatgctgaacttgttctaccagactttttcactcatcagctctgtattcggccaggtcagggagacggagagggacagggggtgtgggggtgaggtgaacacccagaacacacgagaaaaggatgacctgtcttgggggctcagaaatgcagcttatccttggaagaaacgcagacatgtgaagaatcagggacatggagacctggagggaggagagacggtgagacagggatagagacactgagagagagaatgaggcgtgatggggaggcagaaatagagtcagagagagactgagagaaggaagatgagcaaaaacaagacaaagaagagcagaaatcaagagattctgagagacagagttgatgagaatgagtgtgaaagagagggagagagagagaacgaataaggctttgggcttcatgtctattctgctcctggatgtcatttctgttttattttttttagacggagtctcgctgtttcattccagctggggtgtagtgttgccatcttggcttactgcaacctccacctcccgggttcaagtgattctcctgcctcagcctcccaagtagctgggactgcaggcatgtgccaccacacctggctaatttttttttttttcttttcgagacagagcctcgctctgttgcctaggctggagtgcagtggcacaatctcagctcactgcaacttccacctccctggttcaagcaattcccctgcctcagcctcctgtagctgggattacaggcgcctgccgctatgccaggctaatgtttttgtatttttagtagagacggggtttcgccatgttggccaggctggtctctaactcctgacctcaagtgatctgcccgcctcagactcctaaagtgctggaattacaggtgtgagccaccatgcccagactgcttctggttcttctgtatccttgcttctcagtctttggtaaagctctccacctaaagaaaatgaaggataaatgacaataaggaacagcatttcttcattttctcccatttctccttctccctctgtgtttttttttttaactttccccagattgtaaaggcagtcttctgctcttttaaaacaaaatactaaaatgtctccttatttattaacctggaaatatgcctattacatattaaatttaagaatatcaagctgcagaacagtatgcatagctgtagtttgttgttgttgttgttttcagacagtatcttgctctgttactcaggctggagtgcagtagtgtgatctcaactccctgccacctccacctcccaggttcaagcaattctcatggctcagcctcccgagcagccgggactataggcgagcgccaccacacccagctaatttttttgtatttttagtagagatggtgtttcaccatgtcggccaggctggtcaacatagctacagctattaagcagggatgtatgttggattcacatgtggggttgtcacagttatggattttcaggaccctactttctgggcggtctgatctggaaagtctgggatggggcccaaggtgagtacttgtaacaagcccgaccagtaattctaatgttctcctcccaccgagaaccacagagaaaagtctggaaggagacccaccagacagttaacaatggttatctctagaaggagagattaagaaggaaatttacatctgactatatatgtttgcatttttgcaattatttgcaataaattaggcattccattcttcatcaaagtaatagaaataacctccaaaatacgtagtcctaacatgtcagcaggcttatcttgtgtaagaatcattttattaatatctgacacagcaagggagatgaggagaggtgggaagagggagagaaaagtatgagaaagacaaataaacaggctgaggtagacaatgggtgacacagaaaggaagtgagacagagactaagagagatagaaaggagagaggcagggagatggggcagaggccaagaaaaagacagaaggatgagggaggaagatgcagaaagaggtaaatgtgagatagatcaaaggagatatagagtcagtgagtgaggggttcagaggcagaggggagtggggaagtggggttcccatggagggattggggcccaggaggcgctctctccctgtgacctgctagctcagccctaggcaaacctcaccaccccttctttcttgcagctgtttgagctcttctctggcttcttgaaatactttcctggggcacacaggcaagtttacaaaaacctgcaggaaatcaatgcttacattggccacagtgtggagaagcaccgtgaaaccctggaccccagcgcccccaaggacctcatcgacacctacctgctccacatggaaaaagtggggtctgggagaggaaaaagggaagggaggggagggagggcaagatggagaggtgagaagagggagggaaaaggggtagggaaggggaagatggggagggaagaagaaagactagggaggggagaatagggaaagggaggagagaacatgaggaaggaaagaaagatgaggtgaaaggagggagaaaatagggaggaggaactgagacagggagagaggggaggtgggaagacagaatgaaagacagagggagagagagagaagactggctgaggaaggaattcggggcaagggacaaaaatacagcaacaagagaaaaaactcacagaggcagaaagagacggggacaaaaagagagaaacacatcaaagagatgtggagagagatagaaacagagttaggaagactaaagagaggctgagagagatgagttagagatacgcggttggatgtgtagaggacagagaaaagcaaactgggccagatagtgtcaaagacctttaggccaacggagggcagccagggagatgggcgtatacacagcaaggctacagcctcccctgaccctccccttccttccctactgtggacgcaggagaaatccaacgcacacagtgaattcagccaccagaacctcaacctcaacacgctctcgctcttctttgctggcactgagaccaccagcaccactctccgctacggcttcctgctcatgctcaaataccctcatgttgcaggtgggccagggacagccagtcaagggggtcttctgacctccttctgagctgcagaaatggggctatgggtaccacctggatgagagaggggatgctggcttcctattctgggagcactgtaggctctgggctagattccaaccaagccaattctgttggtggatgcatggatgcatgaagaatctgtccatgcgttctcccactgttttcttccatcacttaaggattttttgttctaaggtttttgtttgtttgtttgttttttgttttttggtttttttttttttgtcttttttgagacagagtctcgctctgtcacccaggctggagtgcagtggcatgctcttggcttactgcaagcttcacttccagggttcacgccattctcctgcctcagcttcccgagtagctggaactacaggcgcctgccaccacacccggctaattttttgtgtttttagtagagatggggtttaaccatgttagccaggatggtctcgatctcctgacctcatgatgtacaaatttagggggtacatatgcagttttgttacatgcgtaggttttgtaatggtcaagtttgggctgttagggtatttatcacccaaacagtgtacattgtacccattaagtaatttctcatcattcaccccccttctgctccctcactcttctgagtcttcactgtgtatcattcctctctctgtgtccatgtgtacacattttgtagcactcactcatgagtgagaacatgcaatatttgactttctgtgccatcacttaaaaatcgatccatccacttatcatttcatctattcattctttaattcattaattaaagaatgtataattactgattctttcatttatgattcatctaaggacatatactgtcattcatttatttggattacttgatccacaagttgatcctttgaaacagtggtatgttgatggactatttgtcattgattcattggctcattcattcattcattcatgcattcatccatccttctacgaactaggtttcactcttatccttccatgagtcaacctttcaattcacccttaatccatccgtgatttccttcatttatcacaataattcactcatttattcacctctgatctacttatcattcaatccagcctttcatttactcctttatttactcatacttcactaatttaattattcacttgctcttccataaatctagccattcatgtgattattcattaattgggttcattgatttctttgtctatggatcattcattagtgattaattaatcaatccatctattaattgataagtaaatacagacatccatttattggtttgttcatttattcatcaatctttccatccatgaattgatctattgattgattgattgatgtttttatccagttgttcatgaattcatctattgttctattacactgttatatacctgaggaccaagaatagtgtctcaactatattataaacacaataaatattagttcattttctactcatcttagagagggtgttttgagaggtttgtagcctggagttcttaatctgaaattccatgcaaaatcgtggtgtgtgtgtgcatgtgtgtgtgtgtacctgggcatgtgggaagaggatctgtaatattcattagatttcaagcagtgagaattcttgttgcttcctccctcctcccctcaccccatgctgattactttgaggggtatcaaggatctaaccctttactataggtttttcattggtcaatagaaagtagtgtccttgctgaaaggtctctttttaaaaaaatttttttttcttttgagatggagtcttgctctgtcacccagtctagagtgcagtggcatgatctcggctcactgcaacctccacctcctgggttcaagtgattctcctgcctcagcctcctgagtagctaggaatacaggtgtgcaccagcacacccagctaattttttgtatttttaggagagacgggattttgccatgttggccaggctcatcttgaactcctgacctcaaggaatccacccacctcaacctccaaaattgctgggattacaggcatgagccaccatgcctggcctgaaatgcctctttaaaatgagattcattggtcttcttttctgtacagagagagtctacagggagattgaacaggtgattggcccacatcgccctccagagcttcatgaccgagccaaaatgccatacacagaggcagtcatctatgagattcagagattttccgaccttctccccatgggtgtgccccacattgtcacccaacacaccagcttccgagggtacatcatccccaaggtaagaccggctggaaccccatagccctcctgtttgggcatcctggattctcttaatccccgaactcaaccttttgttagctccttaattgagtcccgttgtttttgttttttgtatttcttttttgtggagtgtgtggagggttggagggaatggcaatatcttttgatcttgtgatcctccctcaggacacagaagtatttctcatcctgagcactgctctccatgacccacactactttgaaaaaccagacgccttcaatcctgaccactttctggatgccaatggggcactgaaaaagactgaagcttttatccccttctccttaggtaagctggacccacaatttctttcccagacaccagagggcaggtactatccccaacttgagaaaaacaacgagagatactgattatttgagcacttaatatattctgattgcttcacctgccttatcccattccatcttcactacaaccctataaggaggcttgagaaagaagattacattcccaaaggcacatcttggcaagcaggaccttgggcaagtattttaacatctctaaacctcagtgagttcattttcttaaaaagaaaaaatctgttgggcaccactgtaagcccagtgctgtactgggggctgaagataatgcatcaaacaagtcacacagagacagggttcctgccccaggaaatttaaagtccagcagggaagatgggcattcatcaaataataataaaataatcatctcatgaaatgaatgaatgcctgcaacatgcttagaactgcctggcacaaaggacatgctcacaagggcaattattattataattagacataattgtgataagtgctctaaagggagctttgggagcacaaaataggaaatagtagctaatcttgtggtgggtccgtaaggaaaagcttaccagaggaactggcttccaagctaacatgttcatgggtgagcatcaatcaaccattgcaaagtgtgttccaggcaaaggaaacagcaaggacaaaggccaaaggtagaaacgtgatatggcaccattgagaacctataggaagtccagtgagccttgggtgtagattgcagaaggaaataagacaaagggctcatctgggcaggaccttgaaggttgcaggaggagtttggatttatggtctagcactgggaaggtggaaaaggtcttgacgtgctctgacttgtcccagttctcatcctctactctttggctggttaaaagaaaaactttagacaaattaaacttagcagagtctatctgaacaaagaaacaattcatgaattgggcagcacaaggaaccagtaaaggttcagagagctccatccagcaatgtggtcaggcactatttatccacagggaaaggaactgaggtactgaaacagcctgattggttacagctctgtgtttgccttatctgagcatgtctgggcagcttgtagcctgtgactggctgaagcttggctgccctgattgtccaaggttacttgttacaagaatatactctcaagtttgtttacatgttgagttacattacaatttgttatgtagggaggctgctttaggccaaatttaattgaatttaacatgcaccatccatgaaaggccccagaaacaaacccccagtcttgagtttcatcagtgacttcagtgatccagggtttggcccagcccccggttttgcgcagtacagtgacctccttccacattttatcttcaatgaaaattgggaacatgtgtggtgatggcttgaatgtcaatgtcttctctcaattttgctatctgaagtttctttttttttttttgtcttcagacggagtcttcctgtgttgcccaggctggagtgcagtgtcacgatcacagctcactgcaacctctgcctcccaggttcaagtgattctcctgcctcagcctcccgagtacctgaaactacgggcgcatgccaccatgcctggctatttttttttatttttagtagagactgggtttcaccgtgttagccaggatggtgctgatcttctgaccttgtgatatgcccacctcagtttctgaaagtcctgggattacaggcataagccactgcgactggcctgctaatttgttttaagagaggcagagatgtagggaaataaggacagagacagataagtaacaaagataatgagactgagaaacagagttagggacaaagagggaacacatagagatagagatggggagccagtggcagaaagacagagggcaaacctcagacagtatacagagaggaagagagagagacacagagagagagagagtcacgtaaggagaaggaggaggaggaggaataagaggagagagagtaggaaaaggaaggaggaggggagaaaggagggaaaggagagaaacagaataagagataggaaaaagagagagtgacataaaaagagaggaagaaagaatgaacaagacaaataaggtatctttagagggagatgaaaagaaagaatgagagagaaagagattggggagaaatcagattcaaatagatggagataggaagttaagcaagatggaagaaagccaaaaaaaggagaggaaaagaagaaaagctgtgtctgacaggtatagacagagaaaaagacaggagtagggctgccaggggcagaaagaaaggtataacccaagccaaaagggtactgcagccaaagaaattcgaaaggtgtccaaacagacggccccagagatggggagggcgtgatgagagggagataataagcctcaggctgttgtgaaaaatgttaggtcacacaaagagttacagaagaacaggcccagagacctgcctgtttctaagctcatgtcacccaccttctgggtatgccaaagggatgtggacacttttccaaacacctccacatagacacacttgtccaacaacttgacaggcatagggaatgcctgaaaactcacacttgacatggcctttccaaggtttgcagattatgaaacactgaagtgaagggaaaggctccctttgtctctgcctgagctttttccagcaccctttgttcttatttttctcccaatctgtggtttagaatctactgggggttccttgcacctctgagaatcagtggaagccatagaccctccctgtctcatacgcatcagtcccattcacaatttatatacaattgggcttttccccccttgagctcttgaagcctgtggatctcaggctgagactagaagacagcctagagacacagacacagacacatggccagaaacacataccccacacataccccagaaacaaacacaaggcagtaaccaaaccttaagcctccttagcacaagccaagtgctattctaagaatttttacaattgtctcctttaacctcacaagagccctttgagggaggtgccattctccccatatgagaagtgaagaacactaagaatgttgtcataaatgtgctcacactcacacatgtacaggtacacacacacacacacacacacagaaccagaaatgggtcattatactctgtgggtttcaccaaccctttggaactgtaacagaagctagaaactctcttatataaaaatgaacatggcgccgggtgcagtggctcatgcctgtaatcccactttgggaggccaaggcaggtggattatctgaggtcaggagctcgaggctagcctggccaatatgatgataccccatgtctactaaaaatagaagaaattagccaggcgtggtggcaggtgcctgtaatcccagctacttggtaggctgaggcacaagaatcatttgaaccacctgggaggtggaggttgcagtgagccaagatggtgccactgtgctccagtctgggtgacaaagagagactccatctcaaaaaaaaaaaaaaaaaaaaaaaaaaaaaaaaaaagagagagagagaaatgaacgtggcacatccactcaaagatttgcatctggtttcagagcagcttcctaaaagtccaccctgaattgtaggttaaaggccagtcttatgcaaatctgttgcagtggacatttgtgtctgggcttagggacatggcagagcgaagtgtatgcacctgccctgtgcccacactggtgaccttctgtgtccacagggaagcggatttgtcttggtgaaggcatcgcccgtgcggaattgttcctcttcttcaccaccatcctccagaacttctccatggccagccccgtggccccagaagacatcgatctgacaccccaggagtgtggtgtgggcaaaatacccccaacataccagatccgcttcctgccccgctgaaggggctgagggaagggggtcaaaggattccagggtcattcagtgtccccgcctctgtagacaatggctctgactccccgcaacttcctgcctctgagagacctgctacaagccagcttccttcccctccatggcaccagttgtctgaggtcacattgcaagtgagtgcaggagtgagattatcgaaaattataatatacaaaatcatatatatatatatgttcttgttttttgagacagagtctcacactgttgcccaggctggagtgcagtggcgtgatctcggctcactgcaacctccacccccggggatcaagcaactctcctgcctcagcctccctagtagctgggattacaggcatgcactaccacgcttggctaatttttgtatttttagtagagatggggtttcactgtgtaggccaggctggtctcgaactcctgaactcaagtgattcacccaccttagcctcccaaagtgctgggattacaggcgtgagtcaccgtgcccagccatgtatatatataattttaaaaattaagctgaaattcacataacataaaattagctgttttaaagtgtaaaatttagtggcgtgtggttcattcacaaagctgtacaaccaccaccatctagttccaaacattttctttttttctgagatggagtctcactctgtcacccaggttcgagttcagtggtgccatctctgtccactgcaacctccacatcctgggttcaagtgattctcctgcctcagcctctggaggagctggtatcacaggcgtcccccaccacgcctggctaaattttgtatttttaggtggtcttgaactcctgatgtcaggtgattctcctagctccaaatgttttcattatctctcccccaacaaaacccatacctatcaagctgtcactccccataccccattctctttttcatctcggcccctgtcaatctggtttttgtcactatggacttaccaattctgaatatttcccataaacagaatcatacaatatttgattttttttttttttttgaaactaagccttgctctgtctcccaggctggagtgctatggtgcaatttttgttcactgcaacctctgccttccaagatcaagagattctccagtctcagctcccaagtagctgggattacaggcatgtactaccatgcctggctaattttcttgtagttttagtagggacatgttggccaggctggtggtgagctcctggcctcaggtgatccacccacctcagtgttccaaagtgctgatattacaggcataatatgtgatcttttgtgtctggttgctttcatgttgaatgctatttttgaggttcatgcctgttgtagaccacagtcacacactgctgtagtcttccccagtcctcattcccagctgcctcttcctactgcttccgtctatcaaaaagcccccttggcccaggttccctgagctgtgggattctgcactggtgctttggattccctgatatgttccttcaaatctgctgagaattaaataaacatctctaaagcctgacctccccacgtcaagaggtgatctgtgccattttgtgtgtgattcttttattgtcgggtctctagggatttttctggaaggaatgttggtgagaatgcctctctcacctcaatgccaactctgtgaagggccaaaccattgtcttgctcatccctgtactctcaacacagcgtgtggcatatgacaggtgttcaaaatatttggtgaggaatgaatgaatgagtggctaaatcagccaccccctacccccacagcccacccaaaatggagctaggcctcctccatcagactatatctcctccatatcccactttcttgtgaggtccagaataaattctcatccccaaagggcccaggatgcccccattctgcctaccagttactctcgataccccgtgctgcaatgccaccttttgataaagcttagcgctattcttgcagtggaaccactctaaatccagcctccaggctggacgcggtggctcatgcctataatcccagcactttgggaggccgacgcgggtggatcacttcaagtcaggggttcgagaccagcctgaccaacatacaaaaaccgtgtttcaactaaaaaagatacaacaattacccgggcatggtggtgtgcatctgtagtcccatctactcgggaggctgagacagggtgatcgcttgaatgcaggagggagaggttgcagtgagccaagttcccgccactgcactccagcctgggtgacaaagtgagactccgtttcataaataaataaataaataaatccagcctccaaacattccaccagcaggaccaccacccttccctgagggaggtgctgcaagtttaatatcattatcacaaggatacatcagccagcctgtggccagtgggaagctggccctgggactccaccctgagatgctaaccttttggcgtctgcagcatctgccatctttgggctccttgtagcctctgaagagttaacagagactctgccagtacaaatgcatggcacacattccctcaccaaccacagaaataacaaacagagcaacatgtcttttaagagcgacagcagaatggaaggcgggaagaatgaggaccacggtgccctcagccttctcactcctcattgtccccagtggcctcttgctactctggttctggggccatcccacctcccagggctgcctctctcctaggccctggcctctgcccttcctgggggagcattttgcaaataaaccacagggctttctgaagtctgtccaggtggtgagatgggagagtgtggaagggatggaaaaggaggaggtgggtagacgggaaacagctcacaggcagcaaggcagttggggtcgtactttgggtgggattccacagacaagcttgggaattcctttctggcttatatattaactacagaagcttctggaattttataaggtgaaatggagaggagacagactggagggtgaaattctgatagacttgaggctttgagatgtggtcctggggtggagcaagacaagaaaagtactggagattggggtttgaggagtctatgcaattatttttatttttaaaaatctttgtggctacatagcaggtgtatatatttatgtggtaagtgagatatttcgatacagacatacaatgtataatcacaggcatacaatgtagacaggcataaagtgtatagtcacatataataataacatcatggtaaatggggtaaccatcacctcaagcactcatcatttctttgtgttacattagagttatattccctctgttatgctaaaatgtaccacaggctgggcacagtggttcatgcctataatcccagtattttgggaggctgaggcagacagattgcctgagctgaggagttcgaaaccaccctgggcaacatggtgaaaccctgtctctacaaaaatacaaaaaaaaattagccaggcatggtggcatgcatctgtaatcccagctactctggaggctgaagcgggagaattgcttgagcctggtaggtggagtttgcagtaagccaagattgtgccactgcagtcccgcttgggtgacagagtgagactccatctcaaaaaaataaacaagcaaacaaacaaaagtacaatgaattattgctgacggccatcaccttattgtgctatcaaaaactagatcttattcattgtatcgaactctatttttgtacccattagccatccccagtccctcacctccacccttcccagtctctggtaaccatcattctactctatctccatgagttaaattgtcataatttttagctcccacgaatgagtgagaatgtgcaaagtttgcctttccgtgcctggcttatttcacctaacataatgtcctgcagttccatccatgttgctgcaaatagcaggatatcattcttttttaatggttgaatagtactcccttctgtatgggcaccatatgaacacttaggttgattccataacttggctcttgcaaacagagctgcaaaatacactggagtgcagatatctcttcagtatacggatttccttttttttgatatagatttagcggtgggattgctggattgtgtggtagctctatttttagtggttttctttctttttgtttgtttattttatttctttattcattttttttgagatggagtcttactctgtcacccaggctggagtgcagtggtatgatctcagctcactgcagcctccacctcctgggttcaagcgattctcctgcctcagcatcctgagtagctgggactacaggcacctgccgacacgcttggatgatttttgtaattttagtagagatggagtttcaccacgttggccaggctggtcttgaactcctgacctcagatgactcgcccacctcagcctcccaaagtgctgggattacaggcatgagccaccgcacctggcctattctacttttttttttctttttcttagggaaactccatgttgttcctcaaagtggctctattaatttacattaccaccaacagtgtacaagggttccatggggattacttcagattgagtggtcagagagggctcctttgagaagacttctgagaattggccatgggaaggtgtggggagaagccttctcagctgagggaacagcaaggtcaaagacccagaggtaagaaagcaagcttggaaccttccaggagcaacaaggcattggctctgataatgccttctcctgctaaaatgacagctctaggaaggcagggttcttatttcctgtctatctatctatctatctatctatctatctatctatctatctatcatctatctatctatcatatatctatctatccgtctgtctttatttatttatagaggcagagtcttgctctattgtccattgtattagtccattttcatgctgctgataaagacataccgtagactgggtaatttataaagaaaaaaagtttaataaactcacagttccacatggctgcggaggcctcacaatcatgctgaaaggcaaaagttgcgtcttacatggtggctggcaagagagagaatgagaaccaagagaacggggtttccccttataaaaccaacagatctcatgagacttattcactactatgagaacagtatgggggaaaccacccctatgattcaatgatcacccaccgggtccctcccacaacacgtggggattatgggagctgcaattctagatgagatttgggtggggacacagccaaaccatatcaccaaggctggagtgcagtggtatgatcatggctcattgcagcctccaacttctgggttcaagcaatcctcccacctcagcctcctgattagtggtgactacaggtgtgtgacaccacctctggctggcttttaaattttttggagagatggagtcttgctattttgcccaggctggtctcaaactcttggtctcaaatgatcttcccatcttgacttcccaaagcactgagattacaggtgtgagccattgcacctggctggttctcatttatttaagtattactgctgtcatggtttgctttggtccctgtgggttcccccaccctttgaaacaagtgcctgacacatggtagggttcacaataaatatttgtagaataaataagagctgagccttcaaggggtccaaaatacttgcacggagtttttctaggtgggcacgatgccacccagctgcaggactatttcagggtgttcattggctcctctggttgatcttttgatgcctgtataagaactcccacttctccaaatctgggggccacatctttagagttctcagctttctgtctctcaggaatgaaggagataatatcactgattggagccagattgtctggatgttgaatcccagctccttgctggtgcctttgagaagtgactttagccctccatgtgccttatttctgcctctgtaaacggagatcatcatagcacctctcatgtggggctgtttgacgattcggtgaggtatgtgcaaagagctttttgcacttgcaaaaagtgtctgggatatcattgtgtgctgtaagaatgagctgtaatgattatcactgagacttgttgttgggattaaaagagatcaggtctgtcagggcctggtacacaagaggtactagaaaaataatgggaggtttaggtgctccttcctccagatacactcgtaaatatgactgctgtgtcgtcatctactttttagggatatgaagaatctgctgtgtgaccttagatgaataaatctctgattcactctgggccttggttttccctgcctctgaaaggggtatgatgtttccttcccttttgcctgggcgcaggtactgggtgctttgtagttaagggagtatcagctggtggctcaagggtagattctaacaggaacttccaagctggagaaatactaggctacacctcagagaggggaggtgggtaagggaggcccctgctggtgtgagcaggaggtgggtgagggaggcccctgctggtgtgagctcgatcctttatccctgagcttcagactctcttaagccttcccacatgagaaactgacatccagatggaggtggggaccctgcaatgtaaagccaggtcacctgtccacagaggtgtgtctgataaccagggcatgataggttagagagtgtggtggctaaaagcaccagcccttggatcacctgaggtcaggagttcaagacctgcctggccaacatggtgaaactccatctctactaaacatacaaaaattagcttggtgtggtggtgggcacctgtaatcccagctacttgggaggccgaagcaggagaatcacttgaacccaggaggcagaggttgcagtgagctgagattgcgccatttcactccagcctgggtgacaaaagcgaaactctgtctcaaaaaaagcaccagccttagactcagagagaccaggatttgagcttgggggacctcagcttcctctctgtgtgacctcaggtaagccacttatactctttgggcctcagtttcctcatttgtaaaattgaggccgtgattgaacctccttcaagagctgttgtgagtgctataggggatactatcttaaagcacttaatgcagtgcctggcacatggtagttctgtagaagtgcttgctattttaattcacgtgcacaggtcctgcctgtgggtgagggctcagtagatggaacagcgatggttgatatagttgggattgtgaggattattatgacaggggctaatttgaatgggcctgtgttgtctgccctccccactgccagcctgatttccctctgcctggctttgcagctcctcccattggctgctggggtgtaccccttgcatgcggatgagaaacgagtcaatgaagtcccgtggggaattgggatccagcgtgcactggttgtgctccactttcttggcaatgaagtcctccagcccttgcagctccttaaaggcctgttgctgtggtcctggcaggtgtttcatcaccgaagagaacatctcatagagctggggttgcagagagaggatgggaagggaaggaccgctgtcaggaggcaggaactgatgggaatgggacctgtgtcagagcaagaaaggcactgggttaaaggcacctacctgcccaggtgtttaggtatttcagtggggctggatgggaacatatatgtaagtcttcatgagggttaagtgagaaggctactgtccagaaatttaggtaacatggactgaggcacacatccaggtttcaatgaaggtggattggagcgcacagctaggtgttcagacattcaaggcaggatgtgttggaaaacacctgttcaactgtttagctactcagacggggctggtatgaggggagtgtcacctgtctaggtatgtaggcattcaggtgggcctggttgaagacaactaccgagatacttattgggtctggattgggggcttttgttcagatgttcaggtattaaagtggggctggtgaagatgttgaagaggaggggatacctgttgaggtgtttacctatccaagtgggatgcactgggggcacctctgtaaggtgtgtgattggaaagggttggggaacacttatttgggtgtctggggaataatctgtctagatatttatgtgtttagggtattggttagggcacctgtccatgttttcaggtatttaagtgggtgaagtagagggcgcttggccagatattccagtgggctaatctgggacatttgtgtagatgtgaaatgattatgatgggctggattttgcagcaccaggtgttcaggtatgcaggaggcgggttgaggcagtcacttgtccaggtgttaaaatattcagaagaactgggtagggagcatctgttagaaattatggtaagttggggatgggaacatgtgcccaggtgagagagctgagctgagggtatgcatcctgccttcaggctctgttttggggatcatctgttgagctatccaggtgtccttggagactgggtattgggcacccatcctgggttctggtgcaactttccggttgtccaatattgggggctgattttgaggggacactgtctggaggggggtgggagtttggggcacctgtccccatgtaggggagcagttggcaggttgtggtaggggcgtgacagccaggctgcagccggttacctgccccgtggagggtgccgtgaactggaagctttccagcatcatgcacagcagtgacaggaacttttgtcctcatagtcaaagcggtccccaaagacaatggagctgatgacattggaggtggtacggcttaggaagaaggtgggatagatgctggagcttgcgggtgtggcggtgtattgggggagaagggggttgggaagagagtcaactcagagctctgatgctagtctgagaattccaggaggcactgccctgatgagccacattcccagcgccagactacagggctgggagcgcgggcgcctttccccaccaaggcccggtccccagacagaacgcgcgcgggttcctcgccctgggcgttttccttctcccgcctccacactcggggtgttctgctcaccgcgcgtgccctagacggccttgatgaggaagcccgccttctcctggatacctccttgatgccgcgcttgcccaccccgaagtcccgcagggtggcgatggagaagcgcctgagcggcttggtgcgctcccaggtgcggcaggtcactcctgggagaggaacgcaggggtggggagaggtcaggccgtgggaacaggcacagaagcctcgcgcaggagaactgcaaactcagtcagagaaacacagagagaaacagagaccgaacaggaacaagaggatcagaaaagagacaggccagacagacagatgcacagcagaacagagggagacgggacactccatggagcatagggagggaaggagggagagaaaaagacagagatgggagaagatgatggaagggggggaagtgaggtatggggagatctgcgaggagaaaataaaaatggtgaaagagtcttttttgtttgtatgtttgtttatttgtttttgagacggattctcgctctgtcgcccaggctgaagtgcattgtcgccatcttggccgctcgctgcaacctccaccttccaggttcaagcgtaaaaatggtgaaagactcctaagctgagctggtgaagacagaaaactacggaaagagaaacagagacggtcgggaaggaggagagactgttatcaggagaggaggctggagatgtggaagtaggaataccgcgaaatcctaagacagaggaagaagaaggagaggtcagtggacagaggagaaactcagagaagcacagaagctgagaaggacaaaaagacaaatgaagacagagaaccagggttggaaaacagaaacccaggattgtcctcagagatggggaaagaggagactccagtgagagaggcagggagaaatctggacagggacagggacagggatgctggagacaggcaagagggagaggccgcaatgaagggagctggggagcgaaggccagacagggggctctgccgcagccttcagtgggcaggagagtcagggagaaggctggggacacggaggccatcgagtcggcctggccaccttccccctcttgggcaccccctcaccatagcctttgaagagccagtcgaaggtggcctgctcgcctcgcccgctgaactcctcagcctggtccaccagagcctccttgacggcatcatgtccgcacagcaccacgacccgccggggccccaggtgaatggtgaacacggggccatagcgctcactgatctgatggaggcaggtgggagtggttagagggagcagcccccactctgaatgggcgcagcaccgagatatcatgtactgggatgttttgcccccaggttctcacagtcagggagctggacatcccaagatcctgtctttccagcctaggaccctgatgctgaaactccaaaactccctttcctaagactctggtccacactggtcaatcccctgccacaaagcctcagccaactgggcagcccccaccccgtgccacccatctccctgccttgggacaccttcatgatggagtcacatatgtgctctgtgttcagctgcaggtagtttccaataaagagcaatggggtgggtcccaaaggcagcttccccctgctcttcctctgctgccagactgacatcaagaccatcacagtcaggctggccagcaaggccaccagaagcagccctgaggccagcatggtggcagtggaatgatagatggtgacggctggggtggtttgcctttatactgcctgaaaaaaaggggtggactttggctggttataaaatcacctcatttcacctcccaactacatcctctccgtgaaccccacctagctttggacacaaccagcaaaggaggaggagggggaccccagggaagctgaacagagagggtacctcccgactaaatctgtggtacctcaggaggggtgccccagggctgtggatttaggagcgggcaacagataagctgtagaacaaaggagttgggaatatttgcataggggagcacttgggctttggatttgggatctgggagtgagaatgcaccccaaaattgtggatttgggggttccgaggagaagaatgcaaaggtctgggttttattagggtgagatggaagtgtggctgtgcatctgggggtcttctgttgtggaggatgcagggttaagggtctcaggaggggggattccaggcatatggacttgagagtcttggggctaggaagacccagggctgtgggtgtggagtttctgggaggaggagtgtgtagcaagcccagtaggtcgtcccagaaagcccagcagcccagcactgggcccaggggctgacttgattttgcttttgcccagagctgtctcttgatgcccggaatcctcactggaacctcagagtgaggccaggatgggtgccatggaaactccactgaccatctctggttggcaaaggggtggaagaccagagccatatttcaagggaaatttccacacacctggagaagagtaccttgtgttatcagttggcagagggattggccaggtctggagaaatagtaacaacaacccccaaatggtggaaaaagctcaagtgtcccaagggttgtaatttacaaagacctccactggtttccaacccagatccttagggaaacccactagattgattgtatcatccctattaatattatgattgttgtttatctttctcattttatataagggtctacagaggacagaaaacagacagtaggcaggggacatgcatgagtggccctgaactcccatctctcctgctctgagtacttagttcccctttctggatttggttttcccaccagtagaaagggagtatttaggaaaagatcatatttgagggtgagttaagtctcctttaagggcgattcctgctttgtcaggggctactactattagcaggcagagggaacaatcgcagaagagattggggtaaactccagtgttaggcacagaggtagatcctggggtgggtgtgagtggagaagggatgagtagccctcctgtccttccctcagggaaattcttccttagtaaacggggcagttaccctttggtgagcatggtcgtatatgggaagattaagtctaggtgtgtatgatctggtcgaatctttgtaacagtgaggtttgttcatcatgatcatcctcattttgaagatgagcagatctagactccataaatcctcttgagtgaggtcacacagggaataagtgagggagctgggatgtgaactttcttctcatcccccgtcattgactggcctagatcaccctgggagtcaagtgcaggccaggcttagcaggaggtgagtgctgagactggcatcagcagtggacacactgatgacattggcgggttctgatatcagcatcaggtgtgttcagggagggaaaggcatcgtgttggctttgggactgcccccaggtgtatgcgaggatgggaaacaagttggtactgaacttgataccaggagaatattgaagtcatgtttggtgccaagagggctctgtgtgttgtttcaggtttcattgagggcataagtgtgtcctgcttcaggagggcgtaagaatggcaccatatagggtctgaggttggtcccagtgggctgtgacatgagcatgaggcaggtgctgatattggtcctatgtgggtctgagatgagcctcagccagatcctgagaggggccccagatggccacaggacaggctctgatggttggtccttccagggttgcacctctcctctaggtcaccaaatttggacaagtggatgtgggtgaggttgacactcccaggactggctctaactggctcaaattggctgttgagctctgagacctgtgtggaggaatcaaagagcagagaacaaagcagagagaggaaagctgtttattgattttgtgggggaagaggtgggaaggaggattagcaccagctgggcagacatcaatccatctaatcctggtcaccagcctgcacttgggctggccacaagcctgggtccttcctcttctcccttgtttcttaaaaaggagagaggtagaaatttggagagtttgtttctcagtgagtttggcactaggaagggcactgagtgttcagacaggctgccatgacctggccagggtgggggtggggagagtcaggttgggagaactctagtatttggggacatagagttcaagcaattttggccttgttgattactctgaagtgtggagtaagagaacggtgtctgaaattaagtgggagggacttgtcccagtggcggtgcgggtacaggctttcagagtgagttagtggtgaacccaggaaaatccctttccattgctgggcctctgtttgcctttctggatggatggtacagtggttaagagcaaggttaaggcatggattggaatccaaaccttatcccgtctttgttgtgtgaccttgaacagctgacttcgtctctctgaaccttatggagccaaaaacagctcctagctcttcagctatttaggtgagaagtatatgggtcaaagcaggggaggtacatgtaagtgctcaatgaatattagctgtttttattcatctgtatgttgaagagaatggacgagatgttctctaagccccctcctggcttttacaattctctgctctaacgttatcaaaacttttcctttgagaagggggaagggagacagagttttttgggaacctctctccacatcccttccttagcatagccaagccttacccatgaagctgtgaataggaaattgaacttaggctgcctcctagagcatggcgctgagttaagcagtatccgcaggaagaaaggccagtgttaggccctcagattactctggatgggcctggagccctgcacaggactttgctcacctgtctctctcccgttttctctgatcttgtctttctgtcttcctctttctcgttccctgcaagtcaaccttacccttaactgccctgtgtgctcctgcaactttgcaactttgcatgattttgtccagtggtttctcctagatgcctctgccatgtttatccttatttatacgtctgtctgtgtgtgtgtcagtctgagtgcatgtttgaggttcctgtgtgcatgtatgtttcagcatgtccctgttgacagatgaatttatgcatgcaccaggctttgtggagtgtgtgtttgtgcttgataagtgggcatccattccaacttatgtctacacatgcacatctttgtgagtacctgatgaggtgcatgtgtgttcctgccacctttcctgaatgtttgccagtctctgtctgtctgtgcatgtagcctgagtgcatgctttgtgttatgccacttggggggtacctatgacgtgcatttctttgtccaacctgatgtatggctgcatgttcacatttgtgtggattcatgcacaactgggtgactacatataagtgtttggatgttttatgcatacattttggtgtctgtatgcaggcatgtgggccctgttgtgtacacatgaacatgtggtatttgcctgtacctctctgtgtctggattcaaaaatatccctagcccagatccatttctcttctaaaaaaaaaaaccatgtgaagctttttatgagcatgatcttaattacacgctgcactgtaagcctgtgaggttggttttatcatcttcattttgcaaatgagttggataaggctcccaaaattggaagtcccttgctttgggttctacaatgaatgagggtagagctggagtacggccttgtgtgactgtcaagtccatgctgtcaaccaccaccctggactgccaagccccacctgttttctttatgaaacatcagaaaattgcccctaatctcctgtggttcttgaaaaacttccctgtaagcacataacaaaagattccaaaatgtcagggggaaaaaaagtcttttaataggagggagacttcaacttctagtttttgcattctttggaagattaaccaaagatacggtcagctggtatacccctcaggccattggcagtgagacagtgcaggagttgggaaactagatgttgtgggcggagagtgaaatgtctgtgtttcatatttcagagtgatgacaaggataaaggtgggcctgtggaagtattggctgaaatagagtgaagaaggtcaaagaagagaggaaagtcaagattctttcttcctgagtgtttggatagctcacattcctggccataaagggcttccctaccagtagaatgtcagggcttagagtagagaggtaggaaagaagttgggtagatgacagggatgaacaactttttaaatcacagggcgaaggtgtcagtatccaagtgtctggagagtttcttctggtaatgtttgagtagcttctattggatcaagcatcctgtgaataacagctattaactctgaagaaaacatttttaagaacccagttctctgaaattactggagagtgaacgaaagcagcagatactgaagggggttggatgaagcaggtttcctattttgggtgttttttttaatgctttcggcctaaaggcagaccctggaaagtgccttgtggggtggcttaatcccagatagagatgttttaatttttttgacttcaagaaccagaggacagaattcaaggtgattatagcatctactgatagtggtggtagaattgcaaaaaggaaagagccagagagggggagccccaaattctgtaaataaactctgtccaaatttctgaccaattgttgaactacttatttgctggagaactccaggtaccctgctaaggctaaaggaacttaattgagatttcagagctgagggtttgagattagccaggttaactgctttccaaattaaacaaacaaccaaaatcagtatttttcaacagaacataatggaatccatggtctctccaacttatcacttgtaatatccaggatgaaatctcaaattactaggtatatgaagatacaagaaatgggggagagtctagccaagatggccaattaggaaaagctccagtctacagctcccagtgtgagtgacgcagaagacgaatgatttctgcatttccaactgaggtaccaggttcatctcatggggcattgtcagacagtgggtgcaggacagtgggtgcagtgcacagagcgtgagccaaagcagggcaaggcatcgcctcacccaggaagtgcaaggggtcagggaattccctttcctagccaaagaaaatgggtgacagatggcacctggaaaatcgggtcacttccaccctaatactgcacttttctaacggtcttagcaaatggcacaccaggggatcagatcccgtgactggctcagagggtcctatgcccacagagccttgctgattgctagcacagcagtctaagaccaaactgcaagacagcagtgaggctgggggaggggcgcctgccattgctgaggcttgagtaggtaaacaaagtggccaggaagctcgaactgggtggagcccaccgcagctcaaggaggcctgcctgcctctgtagactccaccctctaggggcagggcatagccaaacaaaaggcagcagaaaactctgcagacttaaatgtccctgtctgacagctttggagagagtagtggttctcccagcacgcagctggagatctgagaacagacagactgcctcctcaagtgggtccctgacccctgagtagcctaactggaaggcatcccccagtaaggggcagattgacacctcacacagccgggtactcctctgagataaaacttccagaagaatgatcaggcagcaacatttgctgttcaccaatattcactgttctgcagcctccgctgctgatacccaggcaaacagggtgtggagtggacctccagcaaactccaacagacctgcaactgagggtcctgactgttagaaggaaaactaacaaacagaaaggacatccacaccaaaaccccatctgtacatcaccatcatcaaagaccaaaggtagataaaactgcaaagatggggaaaaaacagagcagaaaaacttaaaattctaaaaataagaacgcctctcctcctccaaaggaatgcagctcctcaccagcaatggaacaaagctggatggagaatgactttgttgagttgagagaagaaggcttcagacaatcaaacttctccgagctaaaagaggaagtttgaacccaaggcaaagaagttaaaaaccttgaaaaaagattagacaaatagctaactagagtaaccaatgcagagaagtccttaaaggacctgatggagatgaaaaccacagcaagagatctatgtgacaaatgcacaagtctcagtagtcgatttgatcaactggaagaaaaggtatcagtgatggaagatcaaatgaatgaaataaagggagaagagaagattagagaaaaagaataaaaagaaatgaacaaagcctccaagaaataagggactatgtgaaaagaccaaatctatgtctgattggtgtacttgaaactgacagggagaatggaaccaagttggaaaacactctgcaggatattatccaggagaacttccccaatctagcaaggcaggccaacattcaaattcaggaaatacagagaatgccacaaagatactccttgagaagagcaactccaagacacataattgtcagattcaccaaagttgaaatgaaggaaaaaatgttaagggcagcaagagagaaaggttgggttacccacaaagggaagcccatcagagtaacagctgatctctcagcagaaactctacaagccagaagagagtggggccaatattcaacattgttaaagaaaagaattttcaacccagaatttcatatccagccaaactaagcatcaggagtgaaggagaaataaaatactttacagacaagcaaaagctgagagattttgtcaccaccaggcctgccttacaagagctcctgaaggaagcactaaacatggaaaggaacaaccagtaccagccaccgcaaaaccatgccaaattgtaaagaccatcgatgctaggaagaaactgcatcaagtaacaggcaaaataaccagctaacatcataatgacaggatcaaattcacacataacactattaacatgaaatgtaaatgggctaaatgctccaattaaaagacacagactggcaaattggagagtcaagagccatcagtgtgctatattcagggacccatctcatgtggagacaaacataggctcaaaataaagggatggaggaagatctaccaagcaaatggaggttgcaagcaaatgcaggggttgcaatcttagtctctgagaaaacagactttaaaccaacaaagatcataagagacaaagaaggccattacataatggtaaagggatcaattcaacaagaagagctaacgatcctaaatatatatgcaaccaatataggagcatccagattcataaagcaagtccttagagacctacaaagagacttagattcccacacaataataatgggagactttaacaccccactgtcaatattagacagaacaatgagacagaaggtcaagaaggatatccaggacctgaactctgctctgcaccaagcagacctaatagacatctacagaattctccaccccaaatcaacagaatatacattcttctcagcaccacatcacacttattctaaaattgaccacataattggaagtaaagcactcctcagcaaatgtaaaagaacagaaatcacaacaaactgtctctcagtcaacagtgcaatcaaattagaactcaggagtaagaaactcactcaaaaccacacaactacatggaaactgaacaacctgctcctgaatgactactgggcaaataacgaaatgaaggcagaaataaagatgttctttgaaaccaacgagaagaaagacacaatataccagaatctctgggacacatttacagcagtgaaggggtggcctgcccctccacacctgtgggtatttctagtcgggttgggacgagagactaagaaaagaaataagacacagagacaaagtatagagaaacaacagtgggcccaggggactggtgctcagcataccaaggacctgcaccggcactggtctctgagttccctcagtttttattgattattatcttcattatttcagcaaaaaggaatgtagtaggagggcagggtgataataaggagaaggtcagcaacaaacatgtgagcaatagaatctatgtcataattaagttcaagggaaggtactatgactggacatgcgtgtaagacagatttatgtttctctccacccaaacatttcagtggagtaaagaatgacaaggcagcattgctgcaaacatgtctcgcctcccaccatagggcggtttttctctcatctcagaattgaacaaatgtacaatcgggttttataccaagacattcagttcccaggggcaggcaggagacagtggccttcctctatctcagctgcaagaggctttcctcttactaatccacctcagcacagaccctttacgggtgtcaggctgggagacggtcaggtctttctcatcccatgaggccatatttcagactatcacatggagagaaaccttggacaatacccagctttcaagggcagaggtccctgtggctttctgcagtgcattgtgcccctggtttattgagactagagaatggtgatgacttttaccaagtatactgcttgtaaacattttgttaacaaggcacgtcctgcacagccctagatcccttaaaccttgatttcatacaacacatgtttttgtgagctccaggttgagtcaaagtggctggggcaaagtggctggggcaaagctacaaattactaacatctcagcaaagcaattgtttaaagtacaggtctttttcaaaatggagtctcttatgtctttcttttctacatagacacagtaacagtctgatctctctttcttttccctacacagcagtgtgtagagggaaattcatagcactcaatgcccacaagagaaagcaggaaagatctaaaatcaatatcctaacatcacaattaaaagaactagataagcaagagcaaacagattcaaaagctagcagaaggcaagaagtaactaagatcagagcagaactgaaggaaatagagaccaaaaaaaaaaaacatcaaaaaatcaatgaatccaggaggtggttttttgaaaagatcaacaaaatagatagactgctagcaaaactaataagaataaaaactggaagaagaaaagctgaagaatcaaatagatgcaataaaaaatggtaaaggggatatcactaccaatcccacagaaatacaatctaccatcagagaatacacctctatgcaaataaactagaaaatctagaaaaaatggataaattcttggactcatacaccctccaaagactaaaccaggaagaagttgaatctctgaatagacaaataacaggctctgaaattgaggcaataattaatagcctaccaaccaaaaaaagtccaggaccagatggattcacagccgaattctaccagaggtatgaaaaggagctagtatcatttcttctgaaattattccaatcaataaaaaaagaaagaatcctccccaactcattttatgaggccagcatcatcctgatacctaagcctggcagagacacacacaaaaagaaaattttagatcaatatccctcatgaacatcgatgcaaaaatcctcaataaaatactggcaaactgaatgcggcagcacatcaaaaagcttacccaccaagatcaatttggcttcatccctgggatgcaaggctggttcaacataggcaaatcaataaacgtaatccatcacataaacagaaccaaagacaaaaaccacatgattatctcaatagatgcagaaaaggcctttgacaaaattcaacagcccttcatgctaaaaactctcaataaattaggtattgatggaacgtatctcaaaataataacagctatttatgacaaacccacagccaatatcatactgaatgggcaaaaactggaagcattccctttgaaaactggcacaagacaaggattccctctctcaccactcctattcaacatagtgttggaagttctggccagggcaatcaggcaagagaaagaaataaagtgtattcaattaggaaaagatgaaatcaaattgtccctctttgcagatgatatgattgcatatttagaaaaccccaacatctcagcccaaaatctccttaagctgataagcaacttcagcaaagtttcagcatacaaaatcaatgtgcaaaaatcacaagcattcctgtacaccaataacagacaaacagggagccaaatcatgagtgagctcccattcataattgctacaaagagaataaaatacctaagaaggagaaataagaacacttttaaactgttggtgggagtgtaaactagttcaaccattgtggaagacagtgtggcaattcctcaaggatctagagctagaaataccacttgactcagcaatcccattactgggtatatacccaaaggattatatatcatgctactataaagacacaagcacacttatgtttattgcagcactattgacaatagcaaagacttagaaccaacccaaatgtccatcaatgatagactagattaagaaaatgtggcatgtatacaccatggaatactatgcagccataataaaaaaggatgagttcctgttctttgcagggacacagataaagccagaaaccatcattctcagcaaactatcccaaagacagaaaaccaaacacctcatattctccctcataggtgggaattgaacaatgagaacacttggacacagggcagggaacatcacacaccagggcctgtcaggggatgggggcctaggggagggatagcgtcaggagaaataccttatgtaaaggatgagtcgatgggtgcagcaaaccaacatggcacatgtatacatatgtaacaaacctgcacattgtgcacatgtaccctagaacttaaagtataatttaaaaaaaattagccaggcatggtggctcatgcctgtagtcccagctacttgggaggctgaggcaggggaaatcactcggacctgggaggaggaggaggaggttgtagtgagctgagatcatgccaccgcactccagcctgggtgacagagtgagactctgtctcaaaaaaaaaaaaaaaaaaaaaaaaaaaaaaaaaaaaaaaaaagaaagaaagaaagaaagaaagaaagaaaagaaaagaaaatatttaagatggcaaatttcatggtatgtgtttgttaccacaatcaaagaaaaggttaaaaagaagtaaaggaataaaaggaatgatggcaatattatagcaaatagggaatatatttaaaaagatagaaataattaaaaacaactaaatgggaatgtggagttgaaaagtacagctgaaatgagaaattttccagagggaatttatctagagagaattctcaatagtaggtttaaactggcaaaagaaagaatctgtgaacttgaaaatagattaagattatgcaacttgaagcatagagaaaaattaagaatgaagaaaaatatacagggcctcagagaaatgtgggacactgttaagtgcaccaatctacacataatgggcataccagaagaagagagagaaaaaggggccagaaaaaatattcagagaaataatggcaatagcctacacattcattaagcacaataattccaagtgggataaatgcagacatccacaaatggacacctcataataaaaaatattggaattcaaaaagaagcaggagatcttgaaagcagaaaagaaatatgactcatcagtttcaagtggaccccattaatataacagcctatttctcagcagaaacaatggaagccagaaggcagtgggatgacatattcaaggtactcaaagaaaaaaaagtgttaaccaagaatttttaaccagaaaagctatctttccaataagaagatgaaatactttccaagataaaaagtgagagaattcattgctaacagacccgccttactagaaaaactaaaggaaattcctcaggctgaaagcaagtgactccagattgtaatttgaatccatgtgaaaaaacaaacagcaccagaaaggcaattatgtaacggtagaagacactataaatgtatatttattttgcttccaactgattttaaaacaactgtataaaatatgtgtatctaatacattgttgggcctataacatacgacaaaacatgacacagacagtcctcaacttacaattgttcgacttacaatttttcaactttatgttggtgtgaaagtgatatatactcagtggaaattatacactgaattttaaattttgatatttttgtgtgctagcaatgtatgctatgatactctcttgtgatgctgggaggtggcaatgagcggctcccacttagtcatgcaatcacaaaggtgaacaattgatactatataatatactatatttaatacattacttgagctattcaacaccttattgtaaaataggctttgtgttagatgattttgcccaactgtaggctaatgtaagtgttctgagcatggctaaggtaggctagactaaactatgatgtttggtaggttaggcatattaaatgcatttttcacttgatatttttaaattacagtgggtttatcaggatgtaactccatcataagtcaaggaacatctgtatatgtgtaatatatttgccaatagccacacaaaggaggtaggtgacagcaaagctgtattaagctaaggaaatgactacagataatgagctaataactatagcaatatattgttctgtttgtgatattaatagttgtaatatgtatacaataatgctactaaaggggggaaaataaatagagctgtgtagcagtaatatttttctatatcattggagttgagctagtataaatctggatctgattctgataagttaagatgatctaggtaaaacctagatcaaacatactttatattatgttcagaagaaactcaaaatatagtacaagaatcatttaaaaaattaaaactctacactaggaaatattcatttaattcaaaagaaagcagtaaaggaggactagaggaagaaaaaaagacaaggcacatatagaaagcaaaagtaaagtggcagatgtaaatgtaaccatagaaataacgttaactatgaatgaattcaacaatcaaatctaacggcacagtttttctgactaggtttgaaaaatgtgattcagctatatgctgtccaccataaacatactttagattcaagggtacaaatagaataaaagtttaaaaatggaaaagatatatatagtgcaaatagtaaccacaagagagctggaatacctatactcataccaaacaaaatagaaattaaaacaaaaatatcaatagagaaaaaagacattttattatgataaaagggtcaatgtttaaaaaaattgaacaaactaggaatagaagagtatttcctcaacctgataaaggtcttctttgaaaaacccatagatgaaacccataggtgaaagggccaattcttccccactaagatcaggaacaagacaagaatgtccactctcattacttctacttaacatttgtactggtggttctagccaggacaataagacaagaaacaggaattaaaatcatgcagattgggaaggaaaaagtaaaactctctctagtcaaagatgacatgattttgaatatagaaaattctaaggaacccacaaaaaacctgtcataactaataaaaacaagttcagcaaggttgcaagatatgagatcaatatacaaaatcaatggaatcttttacactgaaaaatgaaattaagaaagcatccattcataatcacatgataaaggaataaatttaactaaaggaagtacaaaaacaatcaggaaagaaacaggagtagcaagaaacagctatagattgcatggttctttcctgacaaaatcagtatgttgaaatccagtccccagtgtgatagtatttggaagtggagcatttgggagatgattaggtgacaagtacagagccctcatgaatgggattcgtgtccttacaaagaagccccagagagctcccttgttcattttaccatgtgaggacacagcacaaagattatgaaccaggaaacaggccctcaccagacacaaagcatgccagtgacttgatcttgtttgtttgtttgtttgtttgtttgttttttgagatggagtcttactccattgcccaggctggagtgtagtggcatgatcctggctcactgcaacctccacctcccaggttcaagcgattctcttgcctcagcctcctgagtagctgggactacaggcacctaccactacgcctggctaatttttgtattttagtagagatggggtttcaccatgttggccaggctggtctcaaacacctgacctcaagccatccacccaccttggcctcccaaagtgttgggattacaggcgtgagctattgtgcctggactatgacttgatcttggacttcccagcctctagaactgtaagaaataaacttcttttctttattaaaaaaaaaaaaggacaaaaaaaagtttaaaaaatggggcttgtctccaagtgaaataaataaatggccagtgagcacatgaaaaatcctagacattattagccatgagggaagatgcaaatcaaaaccacagtgaggtaccccttcaaatatatgagggtcactggaataaaaaagtagtaaaacaataataccaagtgttgacaaggatagcaagagaatggtgccctcataaactgctgatgggcatgcaactgttgcagctgctgtggaaaacagtctggcagtccctggaatggttaaacgaagagcagatgacaccgcagttccattcctagatatgaagctaagtgaaatgaaaatatatgttcacaaatgagaacacatggacacagggaggggaacatcacacaccggggcctgtcgggggggtgggaggcaaggagagggagagcattaggacaaatacctaatgcatgcggggcttaaaacctaaataacgggttgatagttgcagcaaaccaccatgacacatgtatacctatgtaacacatctgcacattctgcacatgtatcccagaacttaaagtaaaataaaataaaacaagaaaatatatgttcacaaaaatttctacatgagtgtttatagctgcattattcacaatggtcaaaaggtggaaagaacacaattgcctattgtcatcggtggaattgtgtcccctaaaaatacatgttgatgtactaacctccagtttctcagaatgtgaccttatttgtaaatagggccatcacatataatcaggttaacatgaggtcattggggtgggtcttattccagtctggctggtgtccttattgacaccagagggaacgagggagacacacagggagaagaaggccatatgttgactgtggcagggactggagcaatgcatccaaaaccaagaaatccaaaccaagaaattctaagaattatcagcaaatactaaaactggaagagtcaaggaagattgatctcctacaggtttcagaaagagcatggctctgctaacaccttgattttgaacttctagcctccagaactatgagacaatatatttctgttgtttttgcttttgttttatgggtttttctttttgtttttgagacagagtctcactctgtcacccaggctggagtgcattggcacaatctcagctcactgcaacctccacctcttgggttcaagtgattctcctgcctcagcctcctgagtagctgggattacaggcacgcaccaccatgccgggctaatttttgtatttctttagcagatacggggtttcactatgttggccaagctggtctcaaactcctaaactcaaaagacccacccacctctgcctcccaaagtgctgggattacaggcgtgagccatcgtgcccagcccatttctgttttttaagccactaagtttgtggtactttgttatatgtacctaggttcccaggcagccctaggaagctaataaactcatccctggataaactgataaatatccatacaacgcaatttcgttcagccacaaaggggaatgaagtagaacttcatgctatgactagcatgaacccttacaaaagtgttagtgaaagaagccaatcagaaaagatcatataatatatgactcaatttacatacaagtcaagaatagagaatctaggccaggcacagtggctcacgcctgtaatctcagcactttgagaggccgaggcgggaggatcatttgaggtcaggagttcaaaacctgcctggccaacatggcaaaatcctatctctactaaaaatacaagaattagccaggcacggtggtgagtgcctgtaatcccagctactcaggaggctgaggcaggagaatctcttgaacccaggaggcggaggttgcagtgaacagagatcatgccattgtactccagcctgggcaacagagcaaggctccatctaaaaaaaaaaaagagagagaaagaaaagaaaagaaaaaaagaatagaggatctataaagaaaagtagattcgtggttactcagggcggggaattgagtgtggggggaaagcagtaagacaaaggtatgaggtttctttttgaggtgatgaaaatgttctaaaattgaccatggtggtggttgcagtattgattaatacacccaaacccatttaattgtacactttatgatctgtaagttatatcaataaaggcgtttttaacaagaaaagaaacagataaaaagaaaaaaagctcacagtaaagaaaatgtcctctctgacttataggtcttgattagttctaggaagaaaattgattcacctagtttctgagaaatgtttactctaattaaatgaattacttccagggaatagcaggagtaccgattctctctaacctgcctcatacttcctggtgttacctaatccacctgggcttcctccatcacagtcctccacattctactctgtgctcccttcatcagagctatgctgggctatgctgggctgtcactgtgagagatggagcactcttccctgctgggctgtgagccctatgtggtgagtcactgagcttttcctggtcaccattatgtcattaggtccttctgtgggccccttgaaagaacctgatgtgtgttgaataattacaatgtaatgtcttatcttatatcctcagaatttctaggaactttttttttttttgagatagaatctcactctgtagccaggctggagtgcaatggctcagtctcggctcactgccacctccgcctcctgggttcaagtgattctcctgcctcagcttcccaagtagctgggactacaggcacgtgccaccacacctagtgaattttagtatttttagaagagacaggctatcaccatgtaggccaggatggtctcaatctcttgacctcacgatccgccctccttagcctcccagagtgctgggaatacaggcgtgagccaccgcaccagcctctaggaactttctaataggctcgcgtcataaatagaaatgaaggctattttgaggacctatagctcttctgtgctttacctaaagagagatcaacaattctctctcctgcttaatgtattcttttttttttcccttgagacacaatcttgctctgtcaccagactggagcgcagtggcgtgatctcagctcactgcagcctctgcctcacgggttcaagcgattctgctgcctcagcctcccgagtagctgggactacaggcacatgccaccatgcccggctaatttttttttttttttggtagagatggagtttcatcatgttagccaggctggtcatgaactcctgaccacaggtgatccacgcgccttgccctcccaaagccctgggattacaggcgtgagccaccgtgcccagcctgctttatgtattctatttgcacgtaagatcatttgaaaaaaggttttcacagctaaaaatgtttgatgcccattgtactgtgtacttgtgaggtgtgtttgtagctctgagatgctgtatttatagaaggggtgccaaggctttaatgatgtgggtttgtatgttggtgtctgtggtgggcataggaatgtgctacttgaatcttcattcatggagaactttccaatcagcttcaataagggcagtgagctgagagtctccagttgcagcaccattaggacccacctcagcatggagcggaacccatgcttttccaaggaagccccagatagtaattaaggactcttggatccagggcataaccctatctgcccaacataagccatccccaacagcatttttctgtggattatgggtctgttatctctgcctggtggtcttggcctgtccctgtccaatcctccttccttcctttctttcacaagtattggatctgcatcctggtctgaagactttttctgctactagtgtcatctgcttccttttttgtctttcacatgcattaccctcctccctccaataaaatgatgaacccctaactccatctaagtcttagcttcccagaagatgtaattcccaaaatgtacataatggtgcttattgtttgtttgttttgagacagagtctcccactgttgcccaggctggagtgcagtggcactatctcggctcactgcaacctccccctcccgagttcaagtgattctcatgcctcagcctcctgagtagctgggattacggggatgcaccatcacgcctggctaatttctatttttagtagagatggggtttcactgtgttggccaggctggtcttgaactcctggcctcaagtgatctgcccaccttggcctcccaaagtcctgggattacaggtgtgagccaccatgtctggccgcatttattgtttattatatacacagtctcaaaactcttttctgattttctaagtacctcctattgtgtggctcttgatcagggacaaggctttgcctcccactacaacagctgaaggaggtattcattcttcctcacctcaccttgaaccctaaggttttaacatgtggctagatatctggaactcttaatcatgaggatgtgagacaaaaacacagacacaatcaggaaatcatctatagtggcatcaatgggtctagagtcccatggcagtacccagggggtgggtcaggtgttcagtacccaggagatgggtggtgtggcagcaggtcctaccgaatagctttgaacattaccttggctggtggtcccctaccacagcctcttttttctactcatattcttacgctgtttttccagaattgctgttaattttgtgagctaaacaatcaccttccagtagctaacagcctttctatttaaaataaccaaagtcactttatattgcttaaaaataggaaccctggctgggcgcagtggctcacgcctgtaatcccagcactttgggaggccgaggcaagtggaccacctgaggtcaggagttcgagaccagcctggccaacatggtgaaatctcatttctactgaaaatgcaaaaattagctaggcgtggttgtgcacgcctgtaccccagctacttcagggggctgaagcaggagaatcgcttgaacctgggaggcagaggttgcagtgagctgactgttatgggtcccgaggttccctggaggtgacaggttgaagaagtgatcaaagatgaggtgtgcactcctgcctgaactcccactttctctcacaccctatatacaataccgtagcaaaccccaccatctcaggcagtgaaatagttttcaaatctaccacctcctccccagcttcactgctgctgctgggtctgagtcaacatcaccagttgtagtagcctgctaataggtctttgctttcatatccatcatatgatagctagtgtgagcccattaaaatatgtcagtacatatcaccctctgctcaccatccctccaaagaccttgatcactctcagggtaaaagccaaaacctcaccttggcccacaagaccccacacagtctggcccccatcgcctccctggcctcgtttccttcactcctactctgcctccctcctccatgccagctacacctgctccctgtggattcctggatgcacacagcctcctgccttaggactctgctggtttgtttgtttgtttgtttgcttgcttgcttgtttgtttgtttgtgacagagtctcgcactgttgcctgggctggagtgcaatggcgtgatcacagctcactgaaacctctgcctcccaagttcaagtgattctcctgcctcagcctccccagtagctgggattacaggcacctgccaccagtcccggctaacttttgtatttttcttagagacaggggtttcaccatgttggccaggctggtctcaaactcctgacctcaggtgatccgccagccttggcctcccaaagtgtgaggattacaggtgtaagccaccatgctcagtcgctgctggttttttgttgttgttgttgttgtttgttttttgtgtttttgtttttttgttttgagacagcatctcactctgttgcccaggatggagtgcagtggcaggatctcggctcactgaaagctctgcctccctagttcacaccgttctcctgcctcagcctcccaagtagttgggactacagccgcctgccaccacagccagctaattttttgtatttttagtagagacgaggtttcactgtgttagccaggatggtcttgatctcctgacctcgtgatccgcccacctcccaaagtgctgggattacaggcgtgaaccaccgcaccgcgcctggccactgctgttggttaatcattctgtcaggaacactcccttcccagatatcttcatagcttgctgctccaccaccttgtgaaaacacccctaaccatccatttaaattccaatcacagaatgcatatcccacttaccagccttgcttttctaatgcagtatgtcatttgcatatttgtttcatgtatgctttattgtccaccttccttactagaatgttagctccctgatggcggagtttttgtctgttttgcttactgatggatcccaagtccctgaagactacgctggcacttgttgggtattcagtaaatattgcctgaataaatgaaaaagagggaacgtttctgtcagttaatggagtttggaaacggaatgatagaaggtgggaacaactgagctatcctcaaaaatggagtggagagagcaagcatggtggctcacacctgtaatcccagcactttgggaggctaaggtgggcagatcgcttgaggccaggatttcgagaccagcctgggcaaatggtgaaaacccatctctactaaaattacaaaaattagccaggtgcagtggcacgtgcctgtaatctcagctactcgggaggccgaggcacaaaaatcacttgaacccgggaggtggaggttgcagtgagcctagatggtgccactgcactccagcctgggccacagagtgagactccatctccaaacaaacaaacggactggggagtatttggaattgggagttgtgctgagagcaactggaaaggaagattagaagaagagatgatggcggagaaaggtaaggagcaagatgggtgaggatggggcattttacccaggggaagtcactggagagcagctggcagaaactataactaataacaagtcaagaaagacatttcaaactgttggctgtgccctacatcgctgtcacacacaatacacaataaacttgctatgctcaacagacttgaggtctttgttcacttttcgggggctggtggaaatgagaaccaaagagaaaggattttagactacattttggtcaaaatcagagcacacacaaaaagggacaatatgaagacacagggactgcagtaataatttgatgcagccagaaacctaagcaacggtgaccatgtgaccatgaaacctgcaggcagaggtgcaaatcttgcacagggcgttgctcttctacggcaggggaagacacgcagctgtaccttctcaggtgaccctggctgactctgtaatcatagtgcctcctcttagggatgcttgaggattagtaagatgaggaagagggggtgctcctgaacacgagaggagagctgcgttcttcaccgcttcctccttgccccgcaggaggtgtagctcagcgggccacaagacagagctcgtaggtcggggggatgttgccaaagcctgagagcttgggggtgatatcgatgtccacaggcggcaccagcgagtgtagagagaagttctgaagggtggaggtgaagtagagaaagagttccatgcggtccatggcctcgcccaggcagatgcgctttcctggaggcacaggggagggcagaaggaagggtcgcacctgcacaggtcatggggatgtcggggtgtctggactgaccaccccactgagcctcagctgcctcatcggcacctcagggctcatgactgtgactgctttataaaggggtgttacacaggcttagtgggtacctatagttagtgctcagctaggacctgctacttctctgatggctgggattccatctcgttccaagagggaatggttctataggatccatgagtttcaaggttgtgttcatttcagttcctcaagggtttgtcaaatgcctattaggtgccagacactggtgacaaaaaaagtgaaaactcacccttaataacacttactgtttgtaagccactcttccaattgtttggaggcattaatccctgtttcacagatgggagctgaagtgactcacccaaggctccaccatttctaaatggtggagtggagtccagattcccaaccactgtcctgactccaggttccaaatgacatacactttttgttgttgttgttttttgtttgtttgagacaggatcttactctgtcgcccaggctggagtgcagtggcatgatctcggctcactgcaacctccgcctcccgggttcaagtgatttttgtgcctcagcctcccgagtagctgggattacaggcacccgccaccacgcctggctaatttttgaattttagtagagacagggtttcaccatgttggccaggctggtctcgaactcctggcctcaagtgatccgcctgcctcggcttcccaaagtgctgggattacaggcatgagccactgtgccatgccaacatacacttaaaatgttgctgcataaagattttatgacatgagtaggcaaatgactgtctgttgggcaaatttgccctgctgcttgtgttcatacagcctgcaaactatgaatgcttttggcattttaaaatggttggggaaaaaagactcttttgtgttatatgaagataaaacaaaattcaaatttcagtgtccgtaaacagtttttcaggctcacatgcacactcattcatttatatattgtctatggctgctttcatagatcaatggcaaaggttcagagactatctggctggaaaaatagaaaatatgtcttattttgttcttaacagccagttggtttatgccctgtttagtgctattactgagccaacttttttttctaattatcagagtcaatcgttctaatatttactaattctgggattctaaaatgttgtgtggttctatgatataaccttcaaattcacattgtgacttgaacttcaaatacagaccagtggctggggggtggatttagcacatgcctggaggaagtcagaccagagaaacctaccagaggaaaaaggcacaaaggcttcattcttcttgaagcggccctgctcatccagaaagtgctggggatagaaggcatctgggtagcggaagtatttggggtctttgaggacagagccaagcaggggaaatacatctgtgccctggggtgaaaatgggggcagttaggagaaatcagtgttgggctacagaggtagggaaccagggagagagaggagtgcagtggaagggaggcaatgagggtgcaaccccaccttgggcagaaggtagcctcgaaactgagtgtcccggatgaggttgtgggggacacccatgggcacgatgtctaccagtctctgtatttcgtggatgacggcatctgtgtagggcatcttgacccggtcatccacccttgggagccggtgtggtccaatcacttggttaatctcttcatggatcttagctggaaggggccagaaaatatagctgagaacagagaaaaaataaacaaaagcaggaggtgtttttgctagggaagccaggacaaatcctgcattcctagctccagcagaaagagatctcaagtgaaagccatgcatgtttgctcccttcttttttttttttttttaaacagcctgtcacccaggctggagtgcaatggcatgatctcggctcactgcaacctccacctcccgggttcaagtgatttttctgcctcagcctccagagcaactgggattacaggcacctgccacccacctggttaatttttgtacttttaatagagatggggtttcaccatgctggtcaagctgatctcgaactcctgacctcgtgatccacccaccttggcctcccaaagtgctgagattataggtgtgagccaccgcacctggcctgtttggtcgcttctttaacttaacaactgacacactggtgatgctcaattactcatcagacatcgggagacaggcagcttggagtcttgaacgctgccaggacatttggtctttacttaaaagcaccaaaaagccatggtcccagcttggctctcatacatgggttttttacaaaatgggaaagaggcatgctaggtgactaggacagggttgacacaaatgacaagcggttatgtgactgattaagatcaccactggtagagttactcctcttcgcattttagggtttagggatgagtgacttcaccttctattttcttttggagatggagtcttctcactctgttgtccaggctagagtgcagtggcaggatctcagctcactgcaagctccacctcccgggttcacaccattctcctgcctcagcctcccgagtagctgggactacaggtgcctgccactgcgcccagctaatttttaaaatatttttaatagagacagggtttcaccgtgttagccaggacggtcttgatctcctgacctcgtgatccgcctgcctcggcctcctaaagtgctggaattacaggcgtgagccaccgcacctggcctgtgtgacttcacctctgaacttgtgtttcatcatcttcaaaatgagtgtgatagttggacaaggtcatagagttgtaaacattacataaagtctggtgtacaaggaactaggacagtgcttggcacacagaagcatccaataaatattgatttgatattttttctttctttttttttttttttagacggagtcttgctctgtccccaggctggagtgcagtggtgcaatcttggctcactgcaacttctgcctcctgggatcaaatgattctcatgcctcagccccccaggtagctgggattacaggtgtgcactaccacacctggctactttttgcatttttaatagagaaaaggtttcaccatgttggccaggctggtcttgaagtcctggcctcagcaatttgcccatctctgcctcccaaagtgctgggattacaggcgtgagccaccgcacccagcctgattatttagaccagtgaaagacaactcagacaatggaggtgacactagaaacatttgagtggatgtgtgttagcatctctcatctgcaccaggagaaattctttggcttgttttgaattgcattattaaggagaggggccaaaattgggaattttccttaagcaagtagtgagttcctcattactgaagttacccaaatggaccagatcataatttattggagacagattctatttaactttggcagggcggttggctcaataatggccatcaaagataaccacctccaagtctctaaaacctaatgcctggaaggctatatatataagggtaacaaaaacacaagagagactttgaaaatgccagtaaattaagaatcttgagatgaaaagattagcctgggttgttgagattcgccctcaatataatatcgtgtgtctgtataagagagaagtgggagaatcagagttagaaaaaaaaatgtgaggctgggcacagcggctcacacctgtaatcccagcattttggaggccaaggcaggtgagttacctgaggtcaggagtttgagaccagcctggccaagatggtgaaaccctgtctctactaaaactacaaaattagttgggcatggggtggcacacacctgtaatcccagctatttgggaggctaaggcaggagaatcgcttgaacccaggaggcagaggttgcatgagctgagatcacgccactgcaccgcagcctgggcaacagaggaagactctgtctccaaaaacaaagaaaaagaataaaagatgtgatggatgccagaagtaaacagaggtttgaagcagctatgctgctggctttgaagatggaggacagagtcgtgaacccaggattacaaggagtacagctttaacacccggaaaaggcagagaatcagatagtccgttggtgtcagctagtgaaagcctatttgaacttctgaaattcagaacagaaggataatacatttgtgttgttttagacgactaagttcctggtaatttgttacagcagccacaggccgcagacaccaagtagaagattaagttaaatcaccccgcaaagttggggatttcatgtttcaagtcctgaagttctaaagggtgaagagcctgaggccgtgggattctaaattttcaagatgatgtcttctttatgttgggagggggaggtaccagataggcagctcagggtggactcaccttccacttcaggatgcttcattaacagcaagaatccatagcgcagtgtagagctcaccgtctccgtgccagcaaagaagaggttcagagtggtgaggaccaagttcttgaggttgaattctgtacgaggattatttttatcctgaaagtgaggggattgtgaatggaatcactctcttctgtctttattgtctttttttttttttttgacagagtctcgctctgttgcccagactgaagtgcagtggcatgatcccatctcactgcaacctccacctcctgggttcaagtgattctcctgcctcagcctcccgagtagctggagttacaggcacccgccaccatgcccagctaattttgtgtgtgtgtgtgtgtacttttagtagagatggggtttcaccatgctggccaggctggtctcaaacttctgatctcagttgataggcccaccttggcctcccaaagtgctgggattacaggcgtgagccactgcgcctggcctattgtgttattttctcattggctttattgtctattgtatagggagacaacaggtgggtaaaccaagcgtgtctgggagaggacacagtcagaacaaaggtcctgcggcaggaacgtgcctgatgtgttagaggaacagcaaggcagaagctgggatgaatgagatgaagtgaacaatagggaggatgggaggagaagaatgtaggatgccttgtaatatttgaacatgtagggatagtagtgtatagaatttaaatttccaaaggcaaagattcaatactataaaaatataaatttacaaatgtataaaactctaagaaatgatgatacagaagtattaaccttctaaatttctatagaaatgtagaaatagatatatatatatctatagagatatagaaatagagatatatctctatacagacatagaattagagatatatctctatacagatatagaattagagatatatctgtatacaaattcagaagattaatacttctgtatcatcatttcttagagttttatacatttgtaaatttatatttttatgttattgaacctttaatttaaatttaaactctatgccctactgtccctacacgttcacatcttttaactttaacttaaatgtttaacttaaatgttaacttaaattttaaacttcagaaaagttctacatttctgaaattctaagactcaaaactacagttgtaactctctggaatgtataagctgtaagattttaagtttccaagttcctaaattttccaaattcctaaaatttctagattcaaaatctgttttaaagctgtaacagtttatacttttacagtttctatattcatctatagataaaagtaaatgctgtgaaataatgcttgttttgttttgttttgtcctcaatgcttgcagattggttgaaagttgcagcgactagaggttgagaagtgagagggaaggaccaggggaagaagaggaggtacctggtgcatcttgatgagaaagcagtcaatgaagtcccgagggttttgggggtcaaaggatgcttcgttgatcttgaccctggaggcaatgaagtccttgagctcttctaccaagtagtagatgagattgtgtcttcctggcaaatactgcatgattccagagtacatgtcatatagctgtgggaataggcaaggggtctttgtcagtgatgggctccaggggccagcatgggctgagtctggagttggacagctggactcaaagtgcagtgctgggtctaagaatcaggtgaggcccttttgcttcccagaagttgggtcctattgagacagtagttcccccttaaccctggtttaccttccaccatttcagttacgtgcagtcaactgcagtctaaaaatatcacatataataagatatttcgagagagaaagagtacattcacacaactgttgttagaatatattgttataattgttctattttattacttatgaatgccagtctcttactgcactcaatttataaattgaattttgtcatgatacgtatatatgagaaaaacttagtatctacagaattgggtactatccatggtttgaggcatccaccgggggtcttgaacatatcctccagccatgagggggaactactgtactcacctcccaggggtgtggggaggatcaagtggggtataggaaggtgcttagttaactggggttggtgcatggacagagaggtggtggggtgggcacctgtgcccagggagtgctcatctcaatgaaactctcattgatcaaccgcagcagattcaggaactgcttgtcctcatagtcgaagcgacttctgaagacaacggaactgatgacgttggaaacggtgcggctcagcaagaagatggggtcgatgggggcacctgggcagtagaaattgtttatgttggaggcaatgatcatgaatatggggtgtggagtcacagtgatgcatctgagtcccagctctactacttaattgcatgtgtgagccactttatttttgtgttttgagtctagattgaccaatctgcaaattggtttgggaaccgtttcattcactcatgaggattcattatcattatccatataaaataattagcacaatgcctggcatacagtaagcactcaagaaaagctagttgagcttaatcattattttttattattattacttaaatgtgttgttgttagagactcacatatttggggaaaagtgggataagggacacattataaaagttcctgaattctgtctagctctactgatgattccatttgggcaattagaaaaatccttcccagccaggtgcagtggctcatgcctgtaatcccagcactttgggagaccgaggcaggcagatcacaagatcaggagttggagaccagcctgaccaacagggcgaaaccctgtctctactaaaaatacaaaaattagccaggtgtggtggcaggcgcctgtaatcccagctacacaggaagctgaggcaggagaattgcttgaacctgggaggtggaggttgcagtgagccgagatcgtgccattgcactccagcctgggtgacaagagcaagactctgtctcaaaacaaaacaaaacaaaacaaaacaaaatccttcccttgccctcacctacaccttctgtaaaacaagatcagtagatctgggaagaatttctctagaataatgcacatattcataaatacacaattttatgaaaatttctggggtacatgggcatttgaagcttttatgtagacctgttaatcacccatgtagaccaggcaaggcgccttggatgtagaggaaatgtgtctctatttctacctcttatctatttttctggttttttttcagcctctctgtcttttctctatagaccccagtgtttctagaccttattttttggtgggactgaactccttttaaaacataataaaatgagtatagggtttcagatttgcaagataaaaatgttcaaaagatttttttcacaacatgaatatacttaacactactgaactggacacttaaaatgatgaatatggtaacttttatattatgtattttttaccataatacggatatacaaatgtaatgaaatttgagcctgtcttcaagaaaaatcacaaagtcacatgtcaccaaaatctgcataggatatcaagagctcacagacagcctgagatccactgattaaagtttctagtaagtggtctctgagggtcttccatgttaactggttttttttatttttgagacagtctcactgtgtctttcatactgaagtgcagtggcatgatcatagctcactgcagccttgaactcctgggctcaagcaacctccagcctcagccccacaggtggctgacactacaggcatgtgccaccatgcccagctcatgtaaactcttaatatggaagctgccagaaatcttagtggattcttaatattttccctcttcttcctttccagacctttctcccaccaaagctcatcctctcatgactgagagctccataaccacccagtcacccagtggtcctcccccttgtggcccccatacccttggtcttccggaactcctccagtaggtagctggcctcctcctgaattcgctcctcaatgctccgctttcccatcccgaagtcccgaaggatggtcagggggaagcgtcagagaatcctccatcgttctccattggccagagctacacctgccaagatctcagtctcaggcttctgcctccctccccttgctgtgttcaactctgtactagacagtgatggggacagattatgaaagctctagactctgctgtcaaggaagccattctcaaccttcaaggctcaatcaagagagtaaggttctctctctgcaggatcctcaaaaaaaaaaaaaaaaaaaaaagtccagactgaggtggaggaaaagggaatcagtgtaggaatgataggaggagatcaaagagtgtttcttacaggaaggagaggtggaactggaaaaataaataaataactgagtgaatgcataggaaggtggaaggtggagggatgtatggacagagtgccatatagagtgccctggaatggggatattaattctattttctatgtaatacttggattctctgaacgtacacatatgtgtacacagaagctcacacttgtacatcgatatacctacagaaaaggagttatcatgtagtaagacacatttagaaattactaaatgtgtggactgatgagagtcttaaaccaattcactagatctaatgaaattattttgctttattgatgaatggaaggaagagtttatgactggaatgacggatggatggatggacagacggacggacagatggatggatggatggatggatggatggatggatggatggaagacttaatagatgggtggatggttaatggatggatggtttgagatagatggataacagttggagagtggatagattgatagatgtatgaatgatgaaagcattgatgaatggatggaatgatggatagatgaatacatagaaagttaattgacagatgtatagataatagagtgaaagatgtttttatagaaagaataatgagtggattttctgatgaatatggatcagtggacaaaaggaagaaaaggtaatagaaagatagatagatagatagatagatagatagacagacagtatgtggtgagtctgcttggaattgaaggatgtgggcagttagagatggattcttgggagaaaaagatctacctaagtgaagaaggcagagacctatgggttaggtatgtgtatgagtatatgaagatgagaaataaggttggctatgagagctttagtgggtgcataaagaatatcactaatccgccaggcttggtagctcatgcctgtagtcccagcactttgggaggctgagacgggtggatcaccagagattgggagttggagaccagcctttccaacatggagaaaccccgtctctactaaaaatacaaaattagccctgcgtggtggcgcatgcctgtcatcccagctactcgggaggctgaggcaggaaaattgcttgaacctgggaggcagagattacagtgagccaagatcgtgccgttacgctccagcctgggtaacaagagtgaaagtccatctcaaaaaaaaaaaaaaaaaaaaaagagaatatcactaatccattaaaataagagcagaaataacacagaagacacagaagacagtttagagtcggatggcataggttcataataaagtgatcctaccacttactgtgtgacattatctaacctttagcttagcttttttttttttttgagacagagtttcactcttgttgcccaagttggggtacaatggtgtgatctcagctcactataacatctgcctcccaggttcaagcgattctcctgcctcagcctcccgagtagctgggattagaggcatgtgccaccacacccagctaatttttatttttagtttttagtagaaatgaggtttcaccatgttagccaggctggtctcgaactcctgacctcaggtgatccaccccactcagcctcccaaagtgctgggattacaggcataagccaccacacccggcctatcttagctttttcattgacaacattagtataatgttaacagctctcctaagggagtcaatacagtaagtcatgtggactacttaccaaagaacctggcatatagggagtgcattgcagtcatttccggttttattgtttttgttgttgttgctacctaccatgaccttggaagttttgctttattgaagccagttctccacggccactgaactcatccgcttggtctaccaaggcttccttcactgcttcatgtccacataaaaccaccactggccggggacccatgtacacagtgaacacagggctgtatttctccctgagcttggagtgaaggaaaacacagtaggaggggctgattggagtaccaagcataggccaattgaggattttagaggatggcgatttcagagggatataaacatggtactaaggaaccaaggtaaatctgggcttggaaggaatactgggaaagaggcatggaagtcttggctcctgtcacccttggcaaaagctcatccctccccgcaagacttactgtctgcatctctaaaataatggacctggatttgatgaattctaggattcatacttctctctctgaaatgttaaatttctagactcttaagacttcatgataccaactctcaaagtgctaagacaacctgagtcaaagagtccttgtgtttaaaaatataatgtactgtgattccaaagtcctcagatcatgaaaatcttatctcaatgtactgagaatgtgtgtttccaatattttaggattctgaaatttcagaattctaagatttgcaaagtctgtgtttctgagagtctgtctttagaagtcataaggttctatgtgaatctggcaataggattagttgcttttagccctattagaggagacagacagactcaccttcatgaaagactgaaacgtagcgtcagttcgaacttgcagcaggttccccaggaaaggaattggtgtaggacctgggggcagctttcctgccttattcattcatttccaggcaatgaggatgagcaggcaagacaagcagagtgccagaaagatggtgacagcccctcccatctccatggtgccaggtcaacaggttctgtcctgggcaccagatcctgcctaaataggtcctgggagatcagcttataccgaaatctgaacaccctgggattcaagttttccgggtctgaatgtcattggagaagagattgctttatatgggaggtggttatataacctataatctcccacctgagtaagggtagattgaattcacaaagggaaatcctctggggccattcccctttcttcaaatttccagtctctctgttcttctctctcagctcaacagaattgaacagaattttttggtggggtgtaagaggcagattattacctttttaggctattgattttaggatccagacaatctgagtacaagcggcagctctgtcttttcttcactgggcaagtcacttaacctctgggacttgtttctccatctatcaaatagggaaaccatgttgttttattttattttattttattttacttttttgagacagattatcactctgtcacccaggctggagcatagtggcgtgatctcatttcactacaacttctgcctcccgggttcaagcaattctcatgcctcagcctcccaagtagctaggactacaggtgcacaccactatgcccagctaatttttgtatttttctagagatgcggtttcaccatgttggccaggctagtctcgaactcctggcctcaagtgatccaccccaatcagcctcccaaagtgctggaattacaggcgtgagccaccgcagctggcagaccatgttgttttagaaagtcttgatagacaacaaggaaaactctttgttcattatttaattaaggataaccttaattaatcagttattagattttttaaattgacacataataattgtacatatttgtggtatatatatgtacataataattgtacatatgtgtgatgttttgatacatgtatgcaatgtataacaatcaaattcgggtaattattatatccattactgagacattgtcatttctttgtggtaagaacattcaaaatcctctcttctaactattttgaaatatgcaatgtattattgttaactacagccagccaccctactgtataatggaacactagaatgttaataaggaaagtaagctgaagatttagaaaacaagagaaataaatcaattgaaagggttttgttcaaagagttcttgttttctactcaagttaatgttaaataacaataatcaaagattacccatgttggtgtatcagaaatttgctgtatcaaatttaaaaaaagaaaaaaaagaactttgctgtagtgtgtgtcagtgtgtgtgtgtgtgtgtgtgtgtgtgtgtgttttgaaagtctaaggtgtagagatcacctctgaaccccagtctctggaggggaatgtcttaataatctaaaaagtgattaactaccttttctgcaccaaatattttcaaagccttattgtcctgaaatgaacttcctggatattatatcctaccctcatgtactatttaacaaaattcaatgtccttttcatgcgactgtattctcagacttggaaaccgaatccctcaaggtatctgtaggtttggggaatggggtttggctggctgagctgaggcatcctgtgtccagaagtggtggaaattctgggaaagctgagtgactcacacacagtgccaccttttgtctcttggatctgctgctagaatgtctttcttggagtagagactcagctcagcccatctcctttgactcccttagctttcaccttcccatcccattctgatcctcaccccccagcacttaacacccattcaggactaacctcttaaccatcttgtggtggtggcatgtgtgtggtgatggtggttggttgtgagtctggttttcctattcagacaggaagggagagagcaagtactcttagaacagctcccttcaccatcccacctccagacaggaagccaggaatggaggaacttgaactaaagttcagctggagttcagtggtgtgatcttggctcactgcaacctccgccttccaggtgcaagcgattctcctgccttagcctcccaagtagctgggattacaggcacccaccaccacgcctggctaatttttgtatttttagtagagatggggttttgccaggtaggccaggctggtcttgaactcctgacctcaagtgatccacctgcctggcctccccaagtgctgggattacaggcatgagccactgcgcccaaccaaatttttttaatttgtcactttgtgccaggcatggatggagctgtgtgcttgacaagcagggtatcctctaatccaaacaaccagcttgcaaggaagggcatgttaaatagtcagagattattcaggtcaccctaaaacaaatattcttataacctgaagctgctggataaacttttttttttaaactctgtgtaatacctttcatacagaggggaaaggcattcagatgtttcaggtgcttggaggtatagctctcattgtcatctggtttgatatattaaattcatatatgactgtatttgagaaaaggttcatatttcagaggcacctagatgtctcccaatatttgttttccctgtcttccgtagtaatagaattctatccagctacatgattatctagagttaaaaactacatttcccaagctcccttgcagctgcgtatggccgtgtagccaagttctgaccaatgagaagtgagtgaaagtgatgcctgcaactttcagtttatgcttttagagggaggggcaaggtttccttccagaatatttcctctttctggctaactgggatagcaagagcaacaacttaggaaggagcagcagcaacatggaaggagcctgggtctttgatatcagtgaactgcctgatgagctcagggttgcttatgcagagccattaagtgtaagaaaattaaatttccacagggcgcggtggctcatacctgtaatcccagcactttgggaggccaaggcaggtggatcactggaggtcaggagttcaagaccaggctggccaacatggtgaaaccccatctctactaaaaatgcaaaaattagccgggcgtggtggcacacacctgtaatcccaactactcgggaagctgaggcaggggaatcgcatgaacccgggaggccgaggttgcagtgagcccagaaggtgccactgcattccagcctgggtgacagaacgagactccatcttcaaaaaataaagaaagaaagaaaattaaatttccatcttatgtaagcccctttaaaccactgttttgggtctttgttatagcagttaacctatatcttaggaaatttggcttctgtgaaaaatgcttgaaaaatcattgaaccaagataagtgcttgttgccttcttttttattgttgtgtctgagtaccacccatatatgaatttaatgtttctttaattgactctcctttttaagaacttaaattcattaagatggaacttggtatttctccctttaatggaaaattagctattttctatcataactagaaaatacctgtgtattagttatctaatactacataacaaaacagctcaacacttagaggcttaagacaacaacgatttgttatttcccacagtttctgtgtgtcaatgtaatttaatgccatactctcccacatccatggggaagtcttcctggtactcatacctgcccccaacttcttttctgcatctcctttcactcttaaactcaagcttagggttcaagtctaaacacagcatgtcagagcttgaagaggtctcagaaatattattagttcagtgtttctcaaaaggtataaaatgcataatttgacccaatgtatacccatggagtataaatcatcagttgtgagatactgcaagattccttgtaaggaggatgtatgtatggatttgagtattacagatgatgataataaacatatttaacaaccagggcagcacaaacattgtctgaagatggagtagggtcctagaggcctctgtagttgctgaattatgggactattggtaagagtggtcctggagaagtggttgaatttcccatttaccaactgctctcgtttggatgtttgtccctgcaaacctcacattgaaatttgatccccaatgttggaggtggaaattaatgggaagtgtttggttcatgatccaggagttacctgatgtcctcctcatggtaatgaatgggttcttgctctattagttaccatgagagctggttgtttaaaagaatttggccataccctctgtctcttgcttcttctctcactatgtgatccctgcacatgctggctctactttgccttctgctatgagtagaagcagcctgaagccctcaccagaagcagatgctggtgccatgcttcttgtacagcaggcaggactgtgagccaaataaatctctttttattataaattactcagccacagatatttggtaataacaacactaaacaaactaaaataccaacctctatcaaaagatgctctaatagtccaggtgtgttggctcacacctgtaatcccagcactttgggaggctgagatgagtggattgcttgaggtcaggagtttgagaccatcctggccaacatgatgacatcccatctctactaaaaataaagaattaaaaaaaaaaactagcttggcatggtggtgggcgcctgtaatcccagctactcaggaggctgaggcaggagaatcacttgaatctaggagacagaagttgcagtgagccaagattgcgccactgcacttcagcctgggcaacagagccagaccctgtctcaaaaaaaaaaaaaggctgtaataactcgtaggaccacacctgtgtacgtgtgctgaattttgtccttaggcattgtccttaagaagtttccttcttcccaggacaggggcttcatcagggctcgacgcagaacatgcaggtgaggggcagggcactgtgaacctggcagaagagctgattattaaatgttcggtaatgatgtgagcttattatgaaatagtcattattaattaaattacgcaaacaaaaacggaatatattatacttttaaaagaaggtaataagtactcaaggctgatcacatcctaattattttactagagtttaccgttatctgtgctattgagatcgtttatgtctatttgtgtctgtatagtgaaaatactatatgatggcatggttttgcacatctcttcccaactccatgttcagtgacaccaccttggccagttgtttgaaattggccatagtgaatgcatgcacagcacagcaatcagaaaactctacaaatgaggtctttttttcctaagagccagctgataaacatttaccagcacaaccctgtgggtgcttttccaaagctgaagatctgggcttgggatgatgtcagcaggtgcccaagggagagtgggggaagtttttcaggaactcactgatatcaagaggaattctatgtgggttgggatccctgtggaagtctccacctccctttgagcaaaggagatggaagagaaagctaggttggagttcagctggctgtagtgttcatgtcttggataatggcatgcggggagcaccctatgactttggagactgacagacatgaagaccatagaaaaagtaagcctccctctgtgagccttttttcaatctgtgtttgggggatgataacaatagtaccttctgtgtagcgttgttcggggttggtgataacgtgcatcgaaggcccttagcacagactttgcttggcacatgctcaaccagtggaaggcttttagcatgattaaatggttgtaaaatggaatgatcctaagagtccctgaaaatgaggccttggacactatctgtgtctcagtttccccatctggaaaatgggacaaatggttgtattgatcttctgaggtatttgggacaattcaatgagttgtgacacagagcaagcatttaataagtgtttgctaatatgaaaattagagttctgctgcgacagtggagctgggaccaggaaaagctgagtggagaaaggatattcatccccttcaccatcaaaacctgggcaaatctgttggtttcctcttggctgcagtagaagggagggtagctagaattggacattttcttctaaggaggcaaaataagtgtgtccaggagatcttcatgggtagtctaagaagacccattatgggcagtgttttatgggatggttccaggactgagctaaacagcctccccaagctggcattttcctaagattatgctattctcagaatctattgttctaatgtttggggattccagaattctgtgatttttaagttttcaatactatgtggattcttccagttgggagtggggtgcagctttaggaaagtaaggagctgaggagggagaggcagtctcaccaacatccacctcctcctggatgtttttatcagaagcaaaaaggtaaagtcagtgcacagttttggttgctgtaggtcccaacgcaaaacaaatgtgtggagtcctaggaaccaaattttaggggtctgaaggtggtacctggatcattcttctcttggggagtgccatcatttccaagaggctgaagaagagatttggagccaacaaacaagacatagaatttattgaagacttacatatacggtggtcccagagcggccacctggacaggaaaaccactaacgtgtgtaaaaagcatatggtttatacaggattgtcacttagcaagctccacctagcaacctccatttaacccaaaacaaagagccttgatcccttgtatggcctgcattacaacaaatgggccaggggttcagatgtccttcccagatatggagtgaatctctgggttggccactcccttatttcttagctcagaaatcccaacttacattcttcctagaccattctcagggtatgcttgagatattgctgtcaagtatgtcttccatacatagggctgagaaaaattattcaaaacacggcaataaggtaaaactgattatgggatgttttaaagtcaagttaagcatattttctaacaagcccacttaaaggtaatttcattccaaaatggaatgtctctttgtttgcacaattaattagtgtctaagcttttttaacttttattttagcttcaggggtacatgtacaggatttattgtataggtaagttgcatgtcatggggtttggtgcacagattatttcgtcacccaggtaataagcacagtacccaataggtagttttttgatcctcaccgtcctaccacctttaaacctcaaataggtcccagtgttctattgttcccatctttgtgtccgtacgttctcaatgcttagctcccacttacaagtgaagacaagaagtatttggagttttgttcctgtgttactttgcttgggataaaggcctctagtttcagccatgttgctgcaaaggacatgatctcattctttttatggcagtgtagtgctccacagtgcatatgtgccacattttatttatccagtctaccactgataagcatttaggttgattccatgtgtttgctattgtgaatagtgctgcaatgaacatacagcactatttatctatttttatggtagaatgatttatattcctatgagtagagacccaataatggtattgctgggtcaaatggtaattctgttttagattctttgagaaactgccaaactactttccacaatggctaaattaatttccatttccaccagcaggtataggcgttcccttttctctacaaccttgccagcatctgttattttttgacattttaataatagccattctggctgggcacggtggctcatgcctgtaatcccagcactttgggaggccaaggtgggtggatcatttgaggtcaggagcttgaaaccagcctggccaacatggtgaaacccctcctctactaaaagtacaaaaattagctgggcgtggtggcgggtgcctgtcatcccagctactcgggtggctgacgcaggagaattgcttgaatccgggaggcagaggttgcagtgagccagccaagattgtgccactgcactccagcctaggtgccagagcaagattctgtctcaaataataataataatagccattctgactagtgtgagatggtatctcattgtgattttcgtttgcatttctctaatgactagtggtgttaatcattttcatatgcttattggccacatgtatgtcttctttcgaaaaatattcatgtccttttcccactttttaatggggttgtttcttttcatgtaaatttgtttaagtttcttatagattccagatattagatctttctcagattcataatttgcaaatattttctcccattctgtaggttgtctgtttactctgctgatagtttcttttgcagtgcagaatctcattagtttaattaggtcccacttgttaatttttgctttgttgcaattgcttttggcagcttcatcatgaaatctttgccaggtcctatgttcagaatgctatttattccctaggttatcttccagaatttttatgattttagattttacatttaagcctttgatccctcttgagctgatttttgtatatggtgtgaggaaggagtccaatttcaatcttctgcatttggatagccggttatctcagcaccatttgttgaatagggagtcatttccccattgctcattttgttgtctttgtcaaaggtcagatggctgtaggcatgtggcattatttcttggctctattctgttccatttatcaatgtgtgtgtttttgtaccagtaccatgctgttttggtaactgtagccttgttgtacagtttgaagttgggtaatgtgatgcctccatctttgttctttttgcttaggattgtcttggctattcaggctctttgttggtttcacatgaatttttaaatatttttttctaattctgtgaagaatgtcattggtagtttgatacaaatagcattgaatctgtaaattactttgggcagtgtggtggttttaacaatactgattcttcctatccatgaacatggaatgtttctccattggtgtcatctctgatttctttcagcagtatttcataattttcattgtagagctctttcacctctttgattaactatattcctggatattttattcttttgtggctattgtgaatggtattgcagtcttgatttggctatcaggttggatgttgttggtgtatggaaatgttacttgtttttatacattaattttgtatcctgaaactttgctgaagttgtttataagatcaaggagattttgagcagagactagggggttttatacttatagaatcatatctgcaaacagggataatttgacttcctcttttcctgtgtgtatccccctttttttttttccttctgcatgattgatttggctaggacttcccgtactatgtcaaataggagtggtgagacagaatccttgtcttgttctggctctcaaagagaatacttccagcttttgcctgttcagaatgatgttgactatgggtttgtcataaatggctcttatgattttgatgtatgttccttcaatgcctagtttgttgaggatttttaatatgaagggatgttgaattttatgaaaaggcttttctgcaactattgacaagatcatatggtttttgtttttagttctgtttatatgatgaatcacatttactgatttgcatatgttgaaccaactttgtatcacagagataaagcctatttaattgtgatggactagctttttaatatgctgctggattcagtttgctagtattttgttgaggattttggcatctatgttcagcaaggatattggcctggagttttctttttttggttgtgtctctgccaggtttgggtatcagaatggtgctggcttcatagaatgagctggggatgagtccttcctgctcattttttttggaatagtttccgtagagatggtactacctctttcttatacatctggtcgaattcagctgtgaatccatctggtcctgggctttttctggttggtaggattttattactgattccatttcagaacttgttattggtctggtcagggatttaatttcttcctggttcaatcttgggaggttgtatgttttcaggaattcattcatttcttctaggttttctagattgtgtgcatagagaggttcacagtagtctctgtgaattttttttttgtatttcagcgtgtcccatggtaaaattccctttgtcattatggttgtgtttatttggggatcttctctctttttttctttattattcttgctagcagtctatctatcttatttattctttcaaataaccaattgctggactcgttgatcttttgttcatatattgtgaaaagtagtgtgatgattcctgaaagaactaaaacaagaactaccattcaacccagcaattccactactaggtatatactgaaaggaatataaataattctaccataaagacacatgcacatgtatgttcactgcagcactattcacaatagcaaatacatggaatcaacctaaatgcccaaaatggtagactggataaagaaaatgtggtacatatacaccatggaatactgtgcagccataaaaaaaagaacaagatcatgccctttgcagaacatggatgaagctggaggccattatctttagcaaactaatgcaggaacagaaaactaaatactgcatgttcccacttagaagtggtagctgaatgatgagaacacatgaacacacagaggggaacagcagacactggggcctccctgagggtggagggtgagaggaggaagaagatcaggaaaaataactggtgggtactaggcttaatactttggtgatgaaatgatctgcacaacaaacccccatgacatgagtttacctgtataacaaacctgcacatgtacccctgaacttaaaattaaaataaataaaataaaataacatttcataaaattttttaaaacagaaaacatgttcattccctggcaactccaccaaaaaaaaaaaaaaaaaggaaagaaaacatggttatatatacaatggaatattattcagccataaaaaaaagaatgaaatcctatcatctgcaggaacatgggtggacctggaggacattatattaagtaaaataagccaggcacagaaagacaaatatcacacattctcactcataatgggagttaaaaaactgatctcatgaaagtggaaagtagaatgttggttagtagaagctgtaatccctagcaagcttcaacaggggagccaatgctttcagtcagggggtggcaccacgtgtcttcaagatgaaatgcctcttggggacaaacatgctactttcaccaagtacataagctttctgcttgtcatacttaggattgaacattgtacatccttcagaagtacatcctactcagatcttgggacagtatgatccccccattttgggcatttccctcatttttggtttgcattgggttgctgctgggagaaccaaatgtctggcagcttcttggtcccttaaaaaaaaaaaatgtgcagcttcagccaggcacagtggctcatgcctgtaatcccatcactttgggagaccaaggtgggcagatcacctgaggtcaggagtttgccaccagcctagtcaacatggcaaaattccgtctctacaaaaataaaaaaattagccaggcgttgtggcttgtgccttgagatacagtgcagtctcttgtcatccactgcttccttattagagagggtagaaccaacactagctaacatcacgggccatacaggttaagcccatcttaacaattttttttcttttttttgagatggagttttgctcttgttgccccaggctggagtgcagtggcccaatctcagctcactgcaacctccgtgcccacccaccatcccccctcccgcccctgagttcaagcgattctcctgcctcagccttcctagtagctgggactacaattgtgtgccaccacacccggctaatttttgtatttttagtagagatggggtttcactatattggccaggctggtcttgaactcctgacctcaagtgatctgtaagcctcagcctcccaaagtgctgggcgtacaggtgtgagccactgcacccagtcacagatgcagatttcttacatgcatgtattgcatcatggcgaagtctaggctattagcgtccccagcacccaaatagtaaacactgtacctaataggtaacttttcaagcctcaccccctcctgcccacccacctttcgaagtctacaatgtctcttgttccactctgtatgtccaagggtatccattgtttagcttccatttataattgagaacatgtgttatttgactttctggtttgacctctttcacttagggtaatggtctccagttccatccatgttgctacaaaagacatgatttcattcttttttatggctgagtagtattctatgttatacatatgccacattttctttatccaaacctccgttgatgggcttagactgattccatagctttgctattatgaatactgctacaataaacatacaagtgtaggtgtcctttttataaaatgatttctttcttttttttttttctttttttgaggtgcagtctcactctgtcgcccaagctggagtgtgcagtggcacgatctcggctcactgcaacctctgcctccctggttcaagcgattctcctgcctcagcctcccgagtagctgggactacaggcgtgtgccaccatgccaggctaattttttgtatttttagtagagacagggtttcaccatgttggccaggctgttctcgaactcctgacctcaggcgatcttcacttctcgacatcccaaagtgctgggattacaaggcattagccatcaccttgtaatccttgcctaaaatgatttctttcttttgctgtgaagaaactcttttagtttaagtcccatttgtctattttttgttttattgcatttgtttttgaggacttcatcataaattctttgcctaggcctgtgtccaaaagaatttttcctaggttttcttctaaaatttttatagtttcaggtcttagatttaggtctttaatccatcttgagttcatctttgtatatggtgagaaataccagtccagtttcattcttcagcaaatgattatccaatcttcccagaaatatttattgaataggatgtcctttccccagtgtatatttttgctgactttgtcaaagattagttggttgtaggtaggtggctttattttgggttttctattctgttccattgatatatgtgtctatttttataccagtacaatgctgttttggttactataggcttgaagtataatttgaagtcaggtaatgtaatgcctccagctttgttctttttgcttggaattgcttaaactatttgggctcttttctgattctatatgaattttaggattgttttttctaattctgtgaaaaacgacggtgttttgatagagattgcattcaatctatagattgctttggactgtatgttcatgttaatgatgctgattcctcaaatccatgagcatgggatatttttccatttgtttatgtcatctacaatttctttcattggtgttttgtaggtcttcttatagagatctttcacctccctggttaaatatattcttatgtattttattttctttgtagctattgcaaatgtattgcctccttgatttggtccttggctagatcgttaccggtatgtggaaatgcaactgatttttgtacattaattttgtatcctaaaactttactgaattcatttctcaaatctaagagttgtttttagagtccttagggttttctaggcataagatcatatcatcagcaaacagggataatttgacttcctcttttctaatttggatgccctccatttgtgtctcttgcctgactgctctggctaggacttccagtactctgttgaataagagtggtgaaagtggcattcttgtcttcttctagttcttaaagagaatgctttcatcttttcaccgttaaatgttatgtttgctgtgggcttgtcatatgtagcctttattatgttgaggtatgttgcttctaggcctggtttgttgaggatttttatcatgaagaaatgctgatttttattgaatactttttctgcacctattgagataatcatatggcttttgtccttcattttgttgatggaatgtatcacgttatggatttgcatatgttgaaccattcttggatccccaggttaaatccgacccaatcatggtgtatgatctttttgatgtgctgttggatttgatttgctagtattttgctgaggctttttgtatctatgtgattcagggatattgatctgtagttttcttttttgttgtgttcttgtctgattttgttatcaggatgatactggcctcgtagaatcagttagggagaattccctcctcctcaattttttggaatagttttacaaggattggtattagttcttctttgtatacttggtaggattcatctgtgaatctatctggtcctggaatttattttcttgaaagacttttttttgagacggagtttcactctgtcacccaggctggagtgcagtggcatgatctcgattcactgcaacctctacctcctgggttcaagcgattctgctgcctcagcctcccaagtagctgggattacaggcgtgcaccaccacgcccagctaatttttgtatttttagtacagatggggtttcactgtgttgaccaggcaggtcttgaactcctgacctcaagtgatccgcacacctcagcttcccaaagtgctgcgattacaggcatgagccaccacaccctgccttcttgggagacttttaattactgattcaatcttgctattcattattgatctgttcaagagttctacttcctggttcaatcttgatagactgtaactgtccagaaatttattcatttcctctaggttttctagtttgtgaggctatagctgttcataatagtctctcatgatgttttgtgcttctatcctatcagttgtaatgtcccattcttcatttctgattgtttttatttttattttctcttctttcctgggttagtctagctagtggttcattaattttaactttttgaagatccaacttttgttttgttgatcttttttattgttttcgtggtttctatttcatttagttctgctctgatctttgttatttctttggctaactttgggtttgatttgttctttttccagttccttgaggtgtgacattggtcgataatttgtgatctttctactgttttttgagatggagtctcactctgtcacccaggcaggagtgcagtggcgcaaactcggctcactgcaacctctgcctcccaggttcaagtcattctcccacctcagcctcccgagtagctgagattacaggcatgcaccaacatgccttgttaatttttgtattttttagtagagacagggtttcttcatactggccagactggtctcgaactcccgacctcaagtgatccaccgcctcaagtgctgggattacagctgtgagccaccatgcctggccctttctacttttttgatgtaggcattcagtgctataaacttccctattagtactgcttttgctgtatcccacagacttttgtgttgtgttttcatttttattcatttcaaactttttttaaatttccagcttaatttctttgctgacctggtgatctttcaagagcatgctgtttaatgcccatgtatttataccatttccaaagttcctcctagtattgatggaatggaatccttttctagctttatccactgtggtctgagatgatacttgatataattttgatttttagaaaatttgttaaggtatgtttcatggcttaatatatggtctatcttggagaatatatcatgtgctgatgaaaagagtgtatattctgtagttgttgggtaaaatgttttataagtgtctgttgagtccattgggttaaagtccaatttaagtctgtatttgtccatttttgcatcactataaaggaacacccaagcctcggtaatttataaagaaaagtggtttaatcagctcacagttctgcaggcagaacatgaagcatggcactggcatctgctactgataagggtctcaggaagcttacaatcatggtggaaggcaatggaggagccagtgtatcacactggcaagagatggaagggggtggtcccaggctcttttaaacaaccagatctcatttaaactgagtgagaacccactcatcaccaaggggatggcactaagccattcatgagggatctgcccctatgatctgatacctccctctaggccctacctccaacataggggatcacatgtccacataagatatggaggggacacacatccaaagcatatgaaaggctaatgtttctttgctaattttgtctctcaatgatctgtttagtgtatgagtgggatattgaagctccccactgttattgtattctgtatatctcattctttaggtctagttgtatttgtttgtaaatttaggggttgtgatgttcggtgcgtatatattcagcactgttatattctcttgctaaattgatccctttatcattatataatgaccttctttgttttgtttttatttttaatgttttttatttaaaatctgttttaactggtataagatatagctattcctgcttgtttggtttttgtttgcatggaatagctttttccatctatgtactttcagtctatatgtgtctttacaggtaaagtgagtttcttataggcagcatatagttgcatcatggtttgtgtgtgtgtgtgtgtttgtttgtttgttttgagatgagttttgctcttgttgcccaggctggagtagtgcaatggcatgatctcgactcactgcaacctctgcctcctgggttcaagcaattctcctgcctcagcctcccaggtagctgggattacaggcatatgccatcacacccagctaatttttgtatttttagtagagacagggtttctccatgttggtcaggctggtctcaagctcccaacctcaggtgatccactcaccttggcctcccaaagtgctgggcatcatgttgtttaaagtattccgccaatacatatcttgtaagtgaagcatttaatccatttattcaaggttaatattgatatgcaaggctttattcttgtcatattgttaattgtttttaagttgttttatgtgataaattatttgtttctttctttttctctttttgtcattgtggtttgatgagattctcccatgttgccatttgattcttttctcttcctcatgtatgaggttgtttttataagaaatgtgagttttatttttctgtgtgttttcatgacgctgagtgttgacctttcatttccatatttaagacccatttgagcatctcccataggaacaggctagtgttgacaagtttactcaccatttgcttctctagaaaagattttatttctccttcatttatgaagcttattctgccagaacataaaatttttggctgacagtacttttctttcagcagttggaaatgccattctcttcttttctagcctgtaaggtttccactgaaaagtctgctgttagtctgatgagttttcttaataggtaactagatgcttttctcttgctaattttaaaattctttctttcttcttgactttagactttctaaatgtactattatgtgaagttctttttgcaatgtatttgctggggctctgtagctggatgtctaactctcttgctagatgtggaagttttcatcaattacttcctaaaaataggtgttctaattttttaaaatctctcttcccccttggaaataccaaaaatgcataagtttggtcacactatgtagtcccagatatctcaaagtctttgatgattcttttttatttatttttctttattttgtcagacaggacatttcaaaagacctgtcttcaagttcttagattctttttttttcttctaattttagagatagggtttcactatgttgcccaaactggccttgaactctgacctcaaggaatccacctaccttggtcttccaaagtgctgggattacaggcatgagccactgcacccagccatgttctgaggttctttcttctgcttggtccagtctactattgaagcttttgaatatattctgtattcccttcattgaatttttttagttcaagagtttctgcttgtttttttttttaagttatttatctaggtaaatttctcattcatttcctggactgattttctaattctttgtattgattttcaaatttctcttgcatcttgtagggctttataaaatcagtattttgaattctttatctggcatattgagggattctttttgattgggatctgttgctggacaattgtggtcctttgatgatgtcacatttttctcctttttcatgtttcctgtgtcctttcattgatatctgcaaatcttgtgtagcagtagcttgttcaagtttttttaattgccctgtaggagaaaatttttttcctgaaaaatgtatgcatgttgttagttgagtaggatactttggctttgattctgggtgcctatggtagtgtgatcttagtatgacttcataggcagtacccagggtcactggtatctttgatttccttggtagcttagagtacagttattacttgagatcgaggagaaatttagctgggtggtggatgccaactgagcccatctttgggccctggtggtggcagcagcttggagagtatggctgagccccagagcagtctactggctttggtattagtgagtcctgggaggctgattcttgagcttcctagtggcttgcttagaggagtcatgggagttgggggacagggatgtgggcaagttctcaggcccctgggaagcacaacctggtgtgatatgggtgatggcagtagtggtggtggagcaatccactaggacccaggcagtccatgttggtgttgctggtagatgcaatgggttgggtgggctactccccagtcccacagcatcctgtagcagggtagtggtattgacctaagtgtgcttaggagagcttgttctcccctgtgcctcccccatctgggtggcggctacagtggcatcacctcagacttggcaaaaagggggacagagcccaacattaaactcttatgattgtgccagctgtgggcttgtgaccaaagaggacaggcccctctctggtaagcagtatggacaagaagttgtggggagtggggtctgctcaagtctccctgtcacagcagcccatagcagggtcggggaaattgtcccaggtatatgtaaaggagctttgtttccctgtccctccttggccaggtggtggctgcagccaggtcaactcaaactgggcctgagggcagggcatggcacagtattaaactctcaaaatggttccttgggcctgcaaccagggtaagaagctgtggggaatgtggttcactcacatctcagtctcaacagcagcccgcagcaaggcagaaaggaccctcccatgggtgcctgggagtgctgggtctcctctatacttacttgaagcagcacagcagcagcaaccatttctatagatctccagtatccaggttctcaaaacagcactcagctgaggctgctctaggctcaaatgggattccatgtgggttccattttccagggcaatgtctctgcacaatctttagggagctccgtatgtcaggcccaagacccaagtgggttgagggtttctaccatagccaagatcataaaagcccatttcaaagtgtggagccctgggagtttctctcttataatttcccctcatccaggagccactctcagctttcagtcaatcccctctccttactcacttcctgtgcttcccttcttttctctgttgaatcccttctcttctctgatgaattccagcattctctcctagataatctgtttaaaatggagttcctctccacgaagaaggccatgctacctgcatctggtcagccatcttgatcacctttctacatttaaagagacacagcatgttaaaaaaaaaaaaaaaattagttcccttacgaattgttgtttacctagccctccctgtcaagaagtggtctgcattttaaaggattttaataagatgaaaaatattctagaataaatttgcagtgaccccatctcccattcttcctgtggtaaggaagaccaaaagctattttttttcttttttcttttcttttctttttttttttctaaaggaaacccctttctcctaactcccttcagaatctgctgctttttttcaccccccagtgatttcagggaattgggttgttaaaaatgttttcttcagagttaatagtttttattcacgggatgcttgctccaaaagaagctactcaaccattaccagaagaaactcttcatcagtgcacttggcagctgacatcttcgtcctcttaaaaaataaaaataaaaataaaaattttttaaagttgttcagaaatggtggctcaaacctgtaatcccaacactttgggtggctgaggcgggcagatcacctgatgtcaggagttcaagagcagcctggccaacatggtgaaacaccgtctcttcaaaagtacaaaaattagtcgggcatgatggtggatgcctgtaatcccagctgctcaggaggctgaggcaggagaattgcttgaagccaggaagcagaggttgcagtggaccgagatcgcgccattgcactccagcctgggcgacagagcaagactccgtctcaaacaaaaaaagctgttcatccctgtcatctatccaacttctttcccatctctgggctctaagtcttgccattttcctggtaggcaggaacttcatggccatggatgtgagctgtccaaacactcagaaaaaaagaatcttgactttcttctcttctttgacctcctttactctatttcagccaacattcccatagccccaccctaatccttgtcatcactctgaaatgtgaaacacagacatttcactctctgaccacaaccactaataccccaactcccccactgcttcattgacaatggcctgaggggtatactggccaactaggtcgttggttaaggttccgaagagtgcaaacactatagaaggtcaagtctccctcctattaaaagactttttttctaacattttgaaaacttttgttacatgtttacaaggaagtatttgaagaagagattacaggcagtttttctaatatttcataaagaaaaacaggtggggcctggcagtccaaagtggtgattaacagcatgaaatttactttcacagccaggcatggtagctcacacctgtaatcccagcactttgggaggccgaagtgggtggatcacctgaggtcaggagtttgagaccagcctgacaaacatggtgaaaccccatctctactaaaaatacaaaaattagctgggcgtggtggctggaatcccagctacttgggaggctgaggctggagaatcacttgaacccaggacacagagattgcagtgagccgagaccgcaccattgcactccagcctgggcaacgagagcgaaagagcaaagctccatctcaaaaagaaaagaaagaaagaaaagaaagaaagaaagaaagaaagaaagaaagaaagaaagaaagaaagaaagaaatttacagtcacacaagaccatactaagactctaccctcattagctgtggaatgcggaagcaagtcacttacaaccaactttgggggccttacctaactcatttgcaaaatggagatgataaagccaacctcacagtcttgcaatgaggagtttaactaagattatgctcataaaaagcttcccacagttctggggttttcttcaagcggataaatggagctgggctaggactgttttaatccaaacacagatgagcacaggaaaatatcagatgttgacatgtatgcaacatggcccacaagcctgcatacagacaccagaatgcacacatgagaacatccacatacttatatgtagtcacccaattgtgaatgcatacatacaaacatgaatatgcggcattcatcttgttttacacagaaatgcacatcatagacacccctaaatcatgtgtgcacacatgctgtatgcagagacagacacatagattggcaagcattgagaaacagtggcacaccctgtcaggcacacacacacatgtgcatgtgcagacataagttggaatggatacccattatcaagcacaaacatacaccccacaaagcctggtgcacacataaattcatgtatcaacatggacatacagaaacatacatgcacatagacactaccagaatgacacacagacagttgaataaatgaggataaacatggcagaggcatccaggagaactcactggacaaaatggcacaaaatacaaagatgcaggagcacacagggtgattgagggaaacattgacttgcagggaaggagaaagagaagatagaaagacaggatccaagacaacggtagacagacaggtgggcaaagtcctgtgcagggctccagggccaaccagaataacctgagagtctaatgctggcctgtccttccacagatactgcctaactcagcaccacactccaggaggccatgaaggattaatttcctattcacagctccatggagtaaagcttggctgtgctgaggaaggggtggggaaagaggttcccaaagactctgtccttttcctccttcccaaaggaaaagatctgtgagctttagactagagaatgtaaaagcaaggaatgtgtttagggaacatcttatccatccgcttcatcgtacagaggaaagagaacaactgctattcattgagcacttactgccatgtacctcacctgcattaacacatatacttctcccctaaatagctgaagaggtaagagctgttcttggctccataaggctcagagataaagtcagctattcaaggccacacaacaaagaagggataaggttaggattccaatccaggccttaatcattgcaccatccatccagaaaaggaaactgaggccaagcaaaggaaagggatcttcctgggttttccactaactcactctgaaaggctgtacccaagacactgcccactgggacaagtccctcccacatgatttcagacaccattctctcactccatgctccagggtaatcaacaagtccaaaattgattgacctctatgtccacaaacactagagttctccaaacctgtctctccccaccccctccctggccagatcatggcaacctgctgatcactcagtgcacttcctagtgccaacctcactgagaaacaaagttcccgaatttctatctcccacctttttaaggaactagaaggaaaaggaggagcccaggcttagggccagcccaggtgcaggctggtgaccaggattagagggattgatatctgccaagctggtgctaatcctccttcccacctcttcccctccaaaatcaacaaacaactttcctctgtcccctttgttctctgatctttgttccctccacacaggtctcagagctcagcatcctagaacactttgagcaagatgtcagtcctgggggggccaacctcacccacctccacttgtccacagttggtgacccagaggagaggtgcaacagtggaaggtccaaacatcagagcctgtcctgtgcccatctggagcccctctcagggtctggctgaggctcatctcagacccacataggaccaatatcaacacctgcctcatgctcatgtcagagcccactgggaccaacctcagaccctatatggtgccactcttatgccctcctgaagcaggactctcttatgccctcaatgacacctgagacaacacacagagccctcttggcaccaaacatgacttcaatattctcctggtgtcaagttcagtgccaacttgtttcccatcctcgcatacacctgggggcagtcccaaagccaacacgatgcctttccctccctggacacacctgatgctgatatcagaacccgccaatgtcatcagtgtgtccactgctgatgccagtcccagcactcacctcctgctaagcctggcctgcacttgactcccagggtgatctaggccagtcaatgaaggggggcgaggagaaagttcacatcccagctccctcacttactccctgtgtgacctcactcaagaggatttatggagtctagatctgctcatcttcaaaatgaggatgatcatgatgaaccaacctcactgttacaaagattcaaccagatcatacacacctagacttaatcttcccatatatgaccatgctcaccaaagggtaactgtcctgtttactaaggaagaatttccttgagggaaggacaggagggctactcatcccttctccactcacacccaccccaggatctgcctctgtgcctaatactggagtttaccccaatctcttctgcgattgttccctctgcctactaatagtagtagcccctgacaaagcaggaatcgcccttaaaggagacttaactcaccctcaaacgtggtcttctcttcccaaacactccctttccactggcaggaaaaccaaatccagaaagtggaactaaagacgcagagcaagagagatgggagttcagggccactcacacatgtcccctgcccactgtctgttttctgtcctctgtagatctttatataaaatgagaaacataaataacaatcatagtattaatagggatgatacaatcaatctagtgggtttccctaagaatctgggttggaaaccagtggagttcttcgtaaattacaacccttgggacacttgagatttttccagcatttgagggttgttattactatttctccagacctagccaatcccctctgccaactggtaacatgaggtactcttctccacgtgtggggaaagttcctctgaaatatggctctcgtcttctgcccctttcccagccagagatgggcagcggaggttctatggcacccatcctggcctcactctgaggttccaatgaggattctgggcatcaagagacagctctgggtcaaagcaaaatcaagtcagtccctgggcccagtgctgggctgctgggctttctgggagcacctgctgggcttgctacacactccacctcccagaaactccacacccacagccctgggtcttcctagccccaagactttcaagtccatatgcctggaatcccccgtcctgagacccttaaccctgcatcctccacaacagaagacccccagatgcacagccacacttccatctcaccctagtaaaacccagacctttggattcctctcccgtggaatgcccaaatccacaactttggggtgcattctcactcccagatcccaaatccaaagtccaggtgctcccctgtgcaaatattccaaactcctcagttccacagtttatctgttgcccgctcctaaatccacagccctgcagcaaccctcctgaagtaccagatttagtctggagttcccctccctgttcagcttccctggggtccctctcctcctcccttgctggctgtgtcctaagctgtgtgggattcagggttggggtgtagttgggaggtgaaatgaggtgattatataatcaaccaaagtccatccctctttttcaggcagtataaaggcaaaccaccccagccatcaccatctatcatcccactgccaccatgctggcctcagggctgcttctggtgaccttgctggcctgcctgactgtgatggtcttgatgtcagtctggcggcagaggaagagcagggggaagctgcctccgggacccaccccattgcccttcattggaaactacctgcagctgaacacagagcagatgtacaactccctcatgaaggtgtcctaaggcagggagatgggtggcacggggtgggggctgcccagttggctggggctttgtggcaggggattgaccagtgtggaccagagtcttaggaaagggagtcttggagtttcagcatcagggtcctagcaggaaagacaggatcttgggatgtccagctccctgactgtgagaacctgggggcgaagcatcccagtacatgatatctcagtgctgggcccattcagagtgggggctgctccctctaaccactcccacctgcctccaacagatcagtgagcgctatggccctgtgttcaccattcacttggggccccggcgggtcgtggtgctgtgcggacatgatgccgtcaaggaggctctggtggaccaggctgaggagttcagcgggcgaggcgagcaggccaccttcgactggctcttcaaaggctatggtgagggggtgcccaagagggggaaggtggccaggtggatgcaatggtctccgtgtccccagccttctccctgactctcctgcccactggaggctatggcagagccccctgtctggtcttctctccccatctcccttcatcgtggcctctccctgtgcgtccctcacctgtctccagcgtccctgtcgtgattcctccctgcctctctctgccccgtctcctccttctctctcactggagtctcctctttcccctctctctccatctctgaggacatcctgggtttctgttttccagccctggtcctctgtcttcatttgtctttttgtcgctctcggcttctgtgcttctccgtgtttctcctctctctgcttccctctcccacttcttcctctgtcttaggatttcagggtattcctacttccacatctccagcctccaactcctggtaattgtctgtcctccttcccgatcctctctgtttctgtctccatatttttctctcttctccagttcagcttaagaatctttcaccatttttatttcctcctcccagatctccccatatctcacttcccctccctccatctctctctttctctccccacttccttcccttcctccatggagtatccccgtatccctctgtttctctgcatctgtctgtctggcctttctgcttctcttctgattctcttattctttctacccggtctctctctctctctctctctctctctctctctctctctctctctctctctctctctctctctctctcgtgctctcgtgtttctctgactgagtttgcagctctcctgggcactcgcgctgaatccatctctctcccaccccactccctctctgctccacccttggggagccccttggagctggtccgctcctgctcccgccgccccctgacctctctccacccccgcgttcacctccccaggcgtggcgttcagcaacggggagcgcgccaagcagctccggcgcttctccatcgccaccctaaggggttttggcgtgggcaagcgcggcatcgaggaacgcatccaggaggaggcgggcttcctcatcgacgccctccggggcacgcacggtgagtaggggaccccgagtgcgagggcgggaacccgcgctttctgcctggggatggggactaggtggggaaaggggcccgcacttccagccctggagtctggcgctgggattcggctcaacagggccctgcctcctggaattctgactctcctcagacctctgagttgactctctccccaacccccttctcccgccacacctgcaggcgccaatatcgatcccaccttcttcctgagccgcacagtctccaatgtcatcagctccattgtctttggggaccgctttgactatgaggacaaagagttcctgtcactgttgcgcatgatgctgggaagcttccagttcacggcaacctccacggggcaggtaactggctgcagcccgccagtgacgcccctaccacaacctgccaactgctcccctacctggagacaggtgccccaaactcccacccccctccagacagtgtcccctcaaaatcagtccccgatattggacaactggacggttgcaccagaacccaggagggatgcccaatacccagtctccaaggacacctggatagctcaacagatgatccccaaaacagagcctgctggcaggatgcataccctcagctcagctctctcacctgggcacatgttcccatccccaacttaccgtaatttgtaacaggtgctccctacccagttcttctgaatattttaacacctggacaagtgactgcgtcaacccgcctcctgcatacctgaacacctggtgctgcaaaatccagcccatcataatcatttcacatctacacaaatgtcacagattagcccactggaatatctggccaagggccctctacttcacccacttaaatgcctgaaaacatggacaggtgccctaaccaataccctaaacacataaatatctagatagattattccctgacacccaaataagtgttccccaaccctttccaatcacacaccttacagaggtgctcccagtgcatcccacttggataggtaaacacctcaacaggtatcccctccacttcaacatcttcaccagccccactttaatacctgaacacctgaacaaaagcccccaatccagacccagtaagtatctggacagctgtctccaaccaagtccacttgaatgcctaaatacctagacaggtgccactcacctcataccagccccacctgaagagctaaacacctggacaggtgtcttccaactcaacttcacttgaatatctgaacacctagatgtgtgctccaatccagcctcatttgcatacctgaaacctggatatatgcctcagttcttctcacctaaattactagaccgtggccctggcacctaatccacgtgaaaacttagatataagtttccatccaaccccactgaaatacctaaacacctggacagatgcctttaactccgttccttccttgctatgaaacaaatccccattcccatcagctcctgccccgtgacagctgtccttcccttcccatcctctctctgcaaccccagctctatgagatgttctcttcggtgatgaaacacctgccaggaccacagcaacaggcctttaaggagctgcaagggctggaggacttcatcgccaagaaggtggagcacaaccagcgcacgctggatcccaattccccacgggacttcatcgactcctttctcatccgcatgcaggaggtacatcccagcagccagtgcaggcaggtgcaaagccagggagagggaaatcaggatgggagtggggtgggcagacgacacaggcccattcaaattagccctcgtcataataatccttacaattggccaggcgcggtggctcatgacctgtaatcccagcactttgggaggccgaggcaggtggatcacctgaggtcaggagttcgagaccagcctggccaacatggtgaaaccccgtctctactaaaaatacaaaaatgagctaggtatggtggcatgcgcctgtaatcccagctactcaggaggctgagacagaagaattgtttgaatccgggaggcagaggttgcagtgagccgggatcatgccactgcactccggcctgagtgacagagcaagaccctgtaaaaaaaaaaaaaaaaaaaaaaaaaaaaaaatcctgacaatcccaactacatcaaccactgctgttccatctactgagccctcacccacaagcacgacttatgcacgtgcattagaatagcaagcacttctacagcactaccgtgtgccaggcactgcgttaagtgctttaagatagtccgccatggaacacttataacagctcttgaaggaggttcaatcatggccccaattgtacaaatgaggaaactgaggcccagagagtttaagtgtcttaactgaggtcacacagtgaggaagccatggtcccccaagctcaaaccctggtctctctgagcctaaagctggtgcttttagccaccatgctctctaaccgttcatgtcctggttagcagacacacctctgtggacaggtgacctggctttacattgcagggtccccgcctacctctggatgtcagcctcccatgtgggaaggctttagggaatccaaagctcagggagaaaggatcaagggagggattcctccacagtaagtttcaagatttttagggaagaaataggatgctgttgcttaaaattctgtgcttgtatctcagaaaaactctttttttctgactcttcatcttgccatctctgtactactttctcttcgtctcccctcatccttctctttccaaatattcctatcattaaaaaagtaacagactgggaaacatggcaaaaccccgtctgtacaaaaaaatggctaggcatggtggtgcatgcctgcggtcccagctactaaggaggttgaggtgggaggatagcttgagcccagggtgggcagaggttgcaatgagccgatatcacagcactgccctccagcctgggtgacagaataagaccgtgtctcaaaaaaaaaaaaagaattaattttttaacagttaacaagtgagcctgcatagtcatgtgcatgtgcagttccagctactcaggaggctgaggccggaggattccttgaacccaggagttggagtccagcctgtgcaacttagcaagaccaagtctgtataagaaaaaaaaaaaaccaactgacagctaagttgacaattaaaggatagatgatcagtgaggtaaagaaggtgagaaggaagagcattttgggcaaagccagcagccagggcaagggctggaacctggagcgagtttggcaaatctagggtccctctttccacctttggtctggaccaaagagaggtagctccaaaggaaaagccctagaagggccccaagagcatggagagtgagcttggtctaaaccgccctctccctgcaggaggagaagaaccccaacacagagttctacttgaagaacctggtgatgaccaccctgaacctcttctttgcgggcactgagaccgtgagcaccaccctgcgctacggtttcctgctgctcatgaagcacccagaggtggagggtaagactggaaagggaggaaagtgaagggccccagaccctcaaaactcccctgagcctggtgcagtgtacccacctatcccagatcccaggaccctgagacgtgccttgctgtccagagacaggacaatattcagctgataggcatcagctgagtctcattagctattaaaatattgaaaatgtctgcactgattggtcagtcactcctgtcccaagcccactgagtgtccgctgcctgctcctctggatcatcccctaagttcctccctgtgcctaccctgtgattctgacacaacctggtttaacaggatcctgctgcaacaatgcgaatggctgatgtctgttctgttatgaatggtctacctccgtgtcataggtggagctatgtcaaccaccgtgttttacctattcggactatcatccctgctctaagacccctagacacctaaacacattcccctcctcccccagccaaggtccatgaggagattgacagagtgatcggcaagaaccggcagcccaagtttgaggaccgggccaagatgccctacacagaggcagtgatccacgagatccaaagatttggagacatgctccccatgggtttggcccacagggtcaacaaggacaccaagtttcgggatttcttcctccctaaggtgctgtctcccctccaccaccaccactcagactacggggacttccagcctctctctgtgtccccagaatcctgcccccattagtgttctagactctgtcccactccctcaatcagtcaaaaaagacttccccaaccaccacatctgttccacctttccacttagacagtcctgagtcctgcatctcgccagactctttgtgtcaggagaatacaccccatgttcccaaacttcctgtcttaagaaacagaagccccctttccattaggccttttgccttagggacacaaatctcaggtccctcaaacaccctgcctagtggaacatggaccccatgtctcccaaacttcctgtttcagagacatgaaacttctatcccccaaagctcctccctcagaggtccccaactcctccatgcctgccactcccctcacctggggcaccctagttccccctgcagcccctgtgtactttcaccaatccccccaacctgcctcattacacacaccttcctcctccctcccagggcactgaagtgttccctatgctgggctccgtgctgagagaccccaggttcttctccaacccccgggacttcaatccccagcacttcctggataagaaggggcagtttaagaagagtgatgcttttgtgcccttttccatcggtaagagaccactgtttgctgccaggccacggctcacaccagcaggggcctctctcacccacctcccctctctgcggtgtagcctggtatttctccagcttggaagttcctgttagaatctaccattgagccgccaccagctgatactcccttaactgccaagcacccaatacctgcgcccaggtaaaagggaaggaaacatcttcccccatagatttatttgtctagggtcacacagcagattcttcagctccctgaaaaggagataatggcacagcacagcagtcatatttgcaagtgtatctggggggtaggggcatctaaacctcccattgctacacctggcatggatcaccccatctatgatggaggcatgacattatgcctttttcaaaacccatagaactgtataacacagagtaaaccctaatgtaaactatggactttggttagtaataatatatcaatattggttcaccattgttatatctcttatagaaggaaactgaagctcagggaggatcggagtctcctctgaaagtctctcaggccataatattccacccctcctccctagagagtgcagccgggggtcagtaggggttgaggctgcactgagagtgggcttcaccttcacccctcctgcctctcctcctcaggaaagcggtactgttttggagaaggcctggccagaatggagctctttctcttcttcaccaccatcatgcagaactttcgcttcaagtcccctcagtcgcctaaggatatcgacgtgtcccccaaacacgtgggctttgccacgatcccacgaaactacaccatgagcttcctgccccgctgagcgagggctgtgctggtgcagggctggtgggcggggccagggaaacggccggggcaggggcggggcttgtgggaggggcggggctaagaatgggggcagtgggggaaggaaggggagaggtggttagagggaacagaagaaacagaaggggctcagttcaccttgatgatgtccttcagagctgtgatgagaggaagggaaaccttacagtatgctacaaagagtagtaataatagcagctcttatttcctgaacaagtacctccgtgtcagctttgttcaaaaagcgttgcacgctcacctcacttaattgccacaaacctctacgaaggggaaaagcgttcatgcccattttacacgtgacaaagctgcggctcagaaagttgtctctatctgatttctcacaaaacgtaagtgcccagaaaatctttgaacacagatctgtgcccatagccctctagatagattcttaaaaagcaccccttcctcacgtaaaatagcttagtatagcatcacatggcctgaacatccctgtcctggggggttttccagagacctggcgggcggctgtcctgccttctctgcacactttcctactcggcacgctttgaacaccagggtgtaatctgagctcgctaccaggtaaggccactgtggcccaatcagagtcagtctaggacacaacgagacatgaatggacatacagagtcagtccattgacaattcctttgcagagcagaagtttttaattttaatgacattctgtcattgtatctcttaatgaagaagttgaaggagagaaccactttaatgccgggagaactctggatcaggacataccatacgcatgtttgtgatcatgtgcaggcatgcatgtgagcatatgactgcatattctcctccgtgtatgcatgaaacacattccactatgggtttctgaaggtggggctctcctgatggatctggggtctgttgtaagacccagctaagagtttcacaatcacctgcccactctcaaagacgttagtgtgtgtcccccttagaagctcccttacagcattcacgaaaattaactccaagtttattgtagacctaaatgaaaagtgagtataaacttctagaagataacgtaggagaaaatctagatgaccttaagtttggtgatggcttattagatacaacaccaaaagcacaatccttgaaagaagcaattgataagttctgagtcattaaaataaaaaatttctgctctgcaagataattgtcaagagaatgacaatacaagctacagactgggagaacatatttgcagggaacatacctgataaaggacttacattcaaaatacacaaagaactgttaaaactcaacaatagaaaacaacccaattaaagaatgggcaaaaatctgagcagacacctcaccaaataaaatatacacacagcaaataagcataaggaaagatgctccacatcatgtcagtagcaatttcaaatttaaaaaataatgatataccgttacctacctattagaatggctaaaatccgaaactgacaacaccaaatgctgacaaggaggtggctcaacaggaactgtcattcactgatggtgggaatgcaaaatggcacagctactttggaagacagattggtggtttcttgcaaagctaaacatattttcactatgtgatacagcaatcatgctcttctgtattaacccaaatgaattgaaaatgtatagccacacaaaaatttctgcacagatatttatagcagctttattcatagttgccaaatcttctaagcaaccaagatgttcttcaataagtgaatggataaatgaactgtggtatgttcatacaatgaaatatggctgggcgtgatggctcatgactgtaattacagcactatgggagaccaaggtgggcagatcgtttgaggtcaggaattcgagaccagcctggccaacatggtgaaaccccatctctactaaaaatacaaaaactagccgggcatggtggcatgcacctgcagttccagctacttgggaggctgaggtgggagaattgcttgaacccatgaggcagaggttgcagtgaactgtgatggagcctctgcactccagcctaggtgacacagtgagactttgtctcaaaaaacaagcaaaaaaaaaaaattatttggcaatacaaagaaatcaggcctcagaaagacatggaagatctgaaatgtatgtagctaagtgaaaaaagccagtctgaaaaggccacatcctatataattccaactatatgacattctggaaaaatgaaactatgaagacagtacaaagatagtagttgccaggagtttagggaggaggaagtatgaataggtgcagcacatgtggtttttagggcagataaactattctgtatgatactgaaatgctacatgacattatgccttattcaaaacccatagaactgtacaacagaaaaaataaaccctaatgtaaactacagactttggttcataataatatatcagtattgattaatcattgtaacaaaggtatcatacttacacaagatgtaaggtatataggaactttcttccattccaagatggatgaatagaagcaactccagtctgcagctcctagcatgatcaacacaaaagatgagtgatttctgcaattccaactgaggtacctagttcatctcactgggactggttggacagtgggtgcagcccatggagggtgagccaaaacagggtggggtattgcctcacccgggaagtgcaaggggttgggagatttccctttcctagccaagggaagccgtgacagagtgtacctggaaaactggaacactcctgcccaaatactgcgcttttccaatggtcttagcaaatggcatgccaggagattatatcccatgcctggctcggcaggtcccatgcccacagagccatgctcactgctagtgcagcagtctgagatcaaactgtgaggcagcagcctggatgggggaggggtatccaccattgctaaggtgtgaggaggtaaacaaagcatacagggaagctcgaactgggtggagcccaccggagctcagcaaggcctgttgcctctgtacattccacctctgggggcagggcataactaaacaaaaggcagcagaaacttctacaaacttaaacatccttgtctgacagctctgaagagagcagtggttcttccagcatggtgtttaagctctgagaatggacagactgcctcctcaagtgggtccctgacccccatgtaacctaactgggagacacctcccaggaggggctgactgacatctcatacacacaggtgggtgcccctctgggatgaagcttccacaggaaggatcaggtgccaatatctgctgttctgcagcctccactggtgatacgcaggaaaacagggtctggagtggacctccagcaaactccaacagacctgaagctgagggaactgactgttagaaagaaaactaacaaacagaaaggaatagcatcaacatcaacaaaaaggacatccccaccaaaaccccatctgtaggccaccaacatccaagaccaaaggtggaaaaaccagagcagaaaacctgaaaattctaaaaaccagagcacctcttctcctccaaaggattgcagctcctcaccagcaatggagcaaagctggacagagaatgactttgatgagctgacagaagtaggcttcagaaagtcagtaataacaaacttctttgagctaaaggagcatgttctaacccattacaaggaagctaaacatcttgaaaaaagactagatgaatggctaacgagaataaacagtgtagataagaacttaaatgacctgaaggagctgaaaactatggcacaagaactacatgacacatgcacaagcttcaatagccaattcaatcaagtggaagaaagggtatcagtgattgaagatcaaattaataaaataaggtgagaagacaagattagagaaaaaagagtaaaaagaaatgaacaaagcctccaagaaaaatgggactgtgtgaaaagaccaaatctacgtttgactgatgtacctgaaagtgatggggagaatggaaccaagttggaaaacacccttcaggatataatgcaggtgaacttccccaatctagcaaggcaggacaacattcaaattcaggaaatacagagaacaccacaaagatactcctcgagaagagcaaccccaagacacataattgtcagattcaccaagatggaaatgaaagaaaaaatgttaagggcagtgagagagaaaggttgggttacccacaaagggaagcccatcagactaacagcagaactctcggcagaaattctacaagccagaagagagtgggggctaatattcaacattcttaaagcaaagaattttcaactcagaatttcatatccagccaaactaagcttcagaagtgagggagaaataaaatcctttacagacaagcaaatgctgagagattttgtcaccaccaggcctgctttacaagagctcctgaaggaaccactaaacatggaaaggaacaaccggtaccagccactgcaaaaacaggccaaattataaagaccatcaaggctaggaagaaattgcatcaactaacgggcaaaatacccagctaacatcataatgacaggatcaaattcacacataacaatattatccttaaatgtaaatgggctaaatgcctcaattaaaagacacagactggcaaattggataaagagtcaagactcatcagtgtgctgtatttaagagatccatctcacgtgcagagacaaacataggctcaaaataaagggatggaggaagacctaccaagcaaatggaaagcaaaaaaaaagcagtggttgcaatcctagtctctgataaaacagactttaaaccaacaaagatgaaaagagacaaagaaggccattacataatggtaaagggatcaaatcaacaaaaagagctaactatcctaaatatacatgcacccaatacaggtgcatatatatttatgcacctagattcataaatatgcactagattcataaagcaagtcctgagagacctacaaagagacttagactcccacacaataataatgggagagtttaacaccccactgtcaatattagacagatgatcgagacagaagcttaacaaggatatccaggaattgaactcagctctgcaccaaatggacctattagacatctacagaactctccaccccaaatcaacagaatatacattcttctcagcaccacatcgcacttattccaaaattgaccacatagctggaagtgaagcactcctcagcaaatgtaaaagaacagaaatcacaacaaactgtctcttagaccacagtggaataaaattagaactcaggattaagaaactcactcaaaaccgcacatctacagggaaactgaacaacctgctcctgaatgattactgggtacataacgaaatgaaggcagaaataaagatgttctttgaaatcagtgagaagaaagacacaatgtagcagaatctctgggacacatttaaagcagtgtgtagagggaaatttatagcactaaatgcccacaagagaaagcaggaaagatctaaaattgacaccgtaacatcacaattaaaagaactagagaagcaagaacaaacacattcaaaagctagcagaaggcaagaaataactaagatcagagcagaactgaaggagatagagtaacaaaaagcccttcaaaaaatcaatgaatccaggagctggttttttgaaaagatcaacaaaatatatagaccactagcaagactaataaagaagaagagagggcagaatcaaatagatgcaataaaaaatgataaagagtatatcacaaccaatcccacagaaatacaaactgctatcagagaatactataaacacctctatgcaaatacgctagaaaatctagaagaaatggataaattcctggacacatacaccctcccaagactaaaccaggaagaaattgaatctctgaatagaccaataacaggctctgaaattgagaaaataattaatagcctaccaaccaaaaaaagtctaggaccagagggattcacagccgaattctaccagaggtacaaagaggagatggtaccattccttttgaaactattccaatcaatagaaaaagagggaatcctccctaagtcattttatggggccagcatcatcctgataccaaagcctggcagagacacaacaaaacaagagaattttagaccaatatccctcataaacattgatgcaaaaatcctcaataaaatactggcaaactgaatccagcagcacatcaaaaagcttatccaccacaatcaaacttcaccacaatcaagggtgaaccagccttggcttcatccctggaatgcaaggctggttcaacatacacaaatcaataaatgtaatccatcacataaacagaaccatcgacaaaaaccacatgattatctcaatagacacagaaaaggccttcaacaaaattcaacagcacttcatgctaaaaactctcaataaattaggtattgagtgaacatatctcaaaataataagagctatttatgacaaacccacagccaatatcatactgaatgggcaaaaactggaagcattccctttgaaaactggcacaagacagggatgccgtctctcaacactccttttcaacatagttctggccagggcaatcaggcaagagaaagaaataaagagtattcagttaggaaaagaggaagccaaattgttcctgttcacaaatggcatgactgtatatttagaaaaccccaacatctcggggagcgcctctgccccgccgccccatctgggatgtgaggagcgcctctgcccggccgagaccccgtctgggaggtgaggggcgcctctgcccggccgcccctactgggaagtgaggagcccctctgcccggccagccgccctgtccgggagggagctgggggggtcagccctccccccggccagccaccccgtctgggaggtgaggggcgcctctgcccggccgcccctactgggaagtgaggagcccctctgcccggccagccgccctgtctgggagggaggtggggggatcggccccctacccggccagccgccccatccgggagggaggtgggggggtcggccccccgcccggccagccgccccgtccgggagggaggtgggggggtcagccccccacccggccagccgccccgtccgggagggaggttggggggggtcagcccccctgcccggccagccaccccgtccgggaggtgaggggcgcctctgcccggccgcccctactgggaagtgaggagcccctctgcccggccagccgccccgtccgggagggaggtggggggggtcagccccccgcccagccagccgccccgtccgggagggaggtggggggggtcagcccccccgcccggccagccgccccgtccgggaggtgaggggcgcctctgcccggccgcccctactgggaagtgaggagcccctctgcccagccagccgccccgtccgggagggaggtgggggttcagccccccgcccggccagccgccccgtccgggagggaggtgggggggggtcagcccccctgcccggccagccgccccgtccgggaggtgaggggcgcctctgcccggccgcccctactgggaagtgaggaacccctctgcccggccaccgccccgtctgggaggtgtgcccagtagctcattgagaatgggccaggatgacaatggcggctttgtggaatagaaaggcgggaaaggtggggaaaagattgagagatcggatggttgccgtgtctgtgtggaatgaagtagacatgggagacttttcattttgttctgcactaagaaaaattcctctgccttgggatcctgttgatctgtgaccttacccccaaccctgtgctctctgaaacatgtgctgtgtccactcagggttaaatggattaagggcggtgcaagatgtgctttgttaaacagatgcttgaaggcagcatgctcgttaagagtcatcaccaatccctaatctcaagtaaccagggacacaaacactgcggaaggccgcagggtcctctgcctaggaaaaccagagacctttgttcacttgtttatctgctgaccttccctccactattgtcccatgaccctgccaaatccccctctgtgagaaacacccaagaattatcaataaaaaaataaataaataaataaataaataattaaaaaaaaaaaaaaaaaaaagaaaaccccaacatctcagcccaaaatctctttaagctgataagcaacttcagcaaagtctcaggatgcaaaatcaatgtgcaaaaatcacaagcattcttatacaccaataacagacaaacagaaagccaaatcatgagtgaacgcccattcacaactgcttcaaagagaataaaatacctagaaatccaacttacacgggatgtgaaggaccttttcaaggagaactacaaaccactgctcaacgaaataaaagaggatacaaacaaatggaagaactttccatgctcatggataggaagaatcagtatcgtgaaaatggccatactgcccaaggtaatttatagattcagtgccatccccatcaagctaccaatgactttcttcacagaattggaaaaaactactttaaagttcatatggaaccaaaagagagcccacattgacaggacaatcctaagcaaaaagaacaaagctggaggcatgatgctacctgacttcaaactatactacaaggctacaataaccaaaacagcatggtactggtaccaaaacagagatacagaccaatggaacagaacagaggcctcataaataacaccacacatctacaaatatctgatctttgacaaacctgacaaaaacaagaaatggggaaaggatccctatttaataaattgttctgggaaaactggctagtcatatgtagaaagctgaaactggatcccttcctggcaccttatacaaaaattcactcaagatggattaaagacttacatgttagacctaaaaccataaaaaccctagaagaaaacctgggcaataccactcaggacataggcatgagcaaggactttatgactaaaacaccaaaagcaatggcaacaaaagccaaaatagacaaatgggatctaattaaactaaagagcttctgcacagcaaaagaaactaccatcagagtgaacaggcagcctacagaatgggagaaaagttttgcaatctacccatctgacaaagggctaatatccaaaatctacaaagaactcaaatttataagaagaaaacaaacaaccccatcaaaaagtgggcaaaggatatgaacagacatttctcaaaagaagacatttatgcagccaacagacacatgaaaaaatgttcattttcactgatcatcagagaaatgcaaatcaaaaccacaatgggatactatctcacaccaaagtcaggaaacaacagacgctggagaagatgtggagaaataggaatgcttttacacttttggtgggagtgtaaactagttcaaccattgtggaagagagtgtggcgattcctcaaggatctagagctagaaataccatttgacccagcaatcccattactgggtatatacccaaaggattataaatcatgctactataaagacacatgcacacgtatgtttattgcggcactattcacaatagcaaagacttggaaccaacccaaatgtccatcaatgatagactggattaagaaaatgtggcacatatacaccatggaatactatgcagccataaaaaaggatgatttcatgtcctttgcagggacatggatgaagctggaaactatcattctgagcaaactatcgcaaggacagaaaaccaaacaccgcatgttctcactcatgggtgggaattgaacaatgagaacattgggtcacagggtggggaacatcacacaccagggcctgtcgtggggtgggggcctggggaagggatagcattgggagaaattcctaatgtatatgaggggttgatgggtgcagcggcccagcatggcacatgtatacttatgtaaggagcctgcacgttgtgcacatgtaccctagaacttaaagtataatttttaaaaaaaggatcgagaattagagttacataagaggagtaagttcaagagatctactgtacagcatggtaactatagttaatgatgatatatcgtatttttggaaaatgcaaagagagtggacattgagttcacactacacaaatgacaattatgtgagataatgcatttgttaattggataaatttaactatttcacaatacttatacttcaaaacatcatgttgcacacaatacaataaatacatttttttgagataggtcttgctctgttgcccaggctggaatgcagtgctaccatcatggctcactgcagcctcgacctcccaggctcaagttatccccccacttaaaccctcaagtagctggaactacaggtgtatattcagttttttgtgcttttatttatttatttttgtgggtacatagtaggtgtatatattgatggagtgcatgagatgttttgatacaggcatgcaatgtgaaataagcacatcatggagaatggggtatccatcccctcaaacatttatcctttgagttgcaaacaatccaattacattctttaaattattttaaaatatacaattaagttattattgactacagtcgccctgtggtgctatcaagtagtaggtcttattcattctttctaacaatttttcgtacccattaaccatccccaccttccccccagtcctccactaccctttccagcctctggtaaccatcttctactctgtgtccatgagttcaattgttttgatttttagatcccacaaataagtaagaccatgcaatgtttgtctttctgtacctggcttatttcacttgacataatgatctcctaatttcttttttgagtccattcaattctagaacatctccttattttttaaactattttgtagacacaaggttttgtcatgttgcccaggctggtctcgaactcctgagctcaagtgatccacccacctctgcctcccaaagtgctgggattacagatgtgagccaccgcgcccagcatttttttttctttgtttttgtcttttatctcacctgggacccatgagattcatttttaaatactcaagttaaaaaggggagatggaggtggaagaagacatgaaacaagattgtttgtgtgttgaaaacctctgggtgatgtgtacatggatcctattttctctccttttttttttttttttttggacagagacttcctctgtcatccaggctgtcatgtcatccatggcacctggccactctatttttatagaactttgaaaattgccaggcatgatggctcatgcctgtaatcccagcactttgggaggccaaggcgggtggatcacctgaagtcggtagttcaagaccagcctgaccaacatggagaaaccccatctctactaaaaatacaaaattagccaggcgtggtggtgcatgcctgtaatcccaactactcaggaggctaaggcaggagactcgcttgaacccaggaagcagaggttgtggtgagccaagatcgtgccattgcactccagcctgggcaacaagagcgaaactccatctaaaaaaaaaaaaaaaatttcaaaattagccaggcatgatggtgcatgcctgtaatcccagctactcaggaggctggggcagaataattgcttgaacccaggaggccaagattgcagtgagccgagatcataccattgcactccagcctgggcaacaagagctaaactctatctcaaaaaaaaaaaaaaaaaaacttggtaataaaaaggttaagagaaatgaagaataaagaggatcagagaatggagcaggaattgaaggatgacatggggtcaagagaaggtctggcattctcatatacgtctcagggaaatgtaaattgataaaccacttggaagagctgtttggcagtacccactaaggctaaaatataccttatcctatggcccaacaataccaaaaataactgaatgcacagattacaaaacgccttgtatgagaatattcaggccaggcgcgatggctcacacctgtaatctaagcactttgggaggctgaggcgggcggatcacttgaggtcaggagttcgagaccagcctggccaacatggtgaaaccctgtctctgctaaaaaatacaaaaattagctgggcatggtggcatgaacctgcagtcccagctactcaggaggctgaggtgggagaatcactagaacccaagagggagaggccgcagtgagctgagatcatgccattgcactccagcctacacgacagagagaaagcctgtctcaaaaaataaaaataaaaaagaatgttcagagcagcttatagccaaaaactggaaacaaatcaaatgttcatcaacaggtgaatggataaagaaattatggtatattcatacagtgaaatacattagcaagactggcacagtggctcatgcctataatcccagcactttgggagactgacacaggcaaatcatttaaggtcaagagttcaggaccagcctgggcaacatagtgagactccatctctaaaaaaataaaaaacaggccgggcgcagtggctcacgtctgtaatcccagcactttgggaggcctaagcgggcagatcacgaggtcaggagattgagaccgtcctggctaacatggtgaaaccccgtctctattaaaaatacaaaaaattagccgggtgaggttgcaggcgcctgtattcccagctactcgggaggctgaggcaggagaatggcctgaacccaggaggcggagcttgcagtgagccgagatcgtgccactgcactccagcctgggcgacagagggagactccgtctcaaaaataaataaataaatgaataaataaataaataataaaaataaaaaacaaaaaaagtagctgggcatggtggtacaggcttatagtcccagctaattggggtgccaaagcaggaggatcacttgagctgaggaggtaaaagaaagagggaaggaaggaaggaaggaaggaaggaaggaaggaaggaaggaaggaaggaaggaaggaaggaaggaaggaaggggcaatacctaccattataccatttctggtgcgtgttttttaatagccatcctaatgaacacgaagttatatctcttgcttttgatttttatttccctagatggctagtgattttgaacatcttttcataaaagggtctttttaagatgggagaaatacagcttattggggttttttgtttgtttgttttgttttgttttttgagacagagtctccctctgttgcccaggctggagtgcagtggtgtgatctcggctcactgcgacctctgcctcccgggttcaagcaattctcctgcctcagcctcctgagtagctgggactacaggcacacaccaccatgccaagctatttttgtatttttagtagagtcggggttttaccatgttggccaggctggtcttgaactcctgatctctattgatctgcccatctcagcctcccaaagtgccgaattacaggcatgagccaccatgcccggccagcttattggctctttatgaaaaatattcaatagagagaagaaaacaaatcacacaggaaatgaaaacatgacacagccactttggaaaagagtttggaagtttcttataaatatacactcatcatagaacccagcagtcacactcacagatatatccagatacacgaaacatagatccccacaaagacatatgcatatatgccaagaataatacatattattcaaaatagccagaccttgggaacaatccacatttccatcaactggtgaaaagcaaattgtggcacatctatatgcggtgacatgctactctgcaatgaaaaggaatgagcttctgatgtatgtaacacatggttaactctcaaaagcattacgtatgcttcccagaagcaggcttggtatatggaagaaatgctgtagattttcttttcttttttttttttttgagacggagtctcgctctgtcgcccaggctggagtacagtggcatgatcttggctcactgccacctccgcctcccaggttcaagtgattctcctgcctcaggctcccgactagctgggattacaggcaccctccatcaagtccagctaatttttgtatttttcatagagagaggggttcaccacgttggccaggctggtctcaaattcctgacctcaggtgatccacccgcctcagcctcccaaaaagctaagattacaggcgtgagccaccatgcccagccgtagattttcatttatatgaaatgtagatcaatagtgggaagaaaaaactagaacagggctggatgcagtggctcaagcctgtaatcccagcactctgggaggctgaggcagaaggattgcttgagcccaggagttcgagatcagcctgggcaacatagggagacctctgcctctacaaaaaatttttaaattagccagttgtgatggcacaggcctctacttccagctactcaggaggctgaggccgggggatcatttgagccagggaggtcaaggttgcagtgaacaatgatcacaccactgcactccagcctgggggacagagcaagaccctgtctcaaaagaagagaaaaaaacctagaacaatggttgcccacaagagatggagcatggttgactaggaaggagtaggaaggagggttctcttttcattattattattactttagagaagggagtctctctttgtcacccaggctggagtgcaggggtgtgttcatagctcactgtagcctggaactcctgggtgcaagtgatcttccacctcagccccttgagtagctgggattacaagcgtgcaccaccacacttagctattgtttttttcttttttttagtagagacaggggtctcgcaatgttgcacagcctggtctcaaatttctggcctctagtgatccttccacctcagcctcctatagctaggattataggcacaaaccaccacgcccagctccaagagaactttcttggatgatgaaaatattctgtatcttcacagggatttcgataccttcaaaattcagcaaatgttcacttaccatgtgtgtatttcatcacaggtaaattttacctaaagaaatcgttaagggaaaactccatctacacaccttcacaggaactatgacacagtaaatagaatcaagtcctccagttggcgatggaatgggatctggcacaccagaagggggctcacctaagcctgacatgggacactgtgtggttctagcaggaaggaaggctgcatgtgccgtccagatgccagtgggcaagaggacaggatgatggaggatgcgcccgcttactgcccattgctgccattctctccgtgagataagaagcgggttcatcaacaaagagtgaggtgactgaagagggttttggagtttgaggaggcaggaacaaaaggataggaatagggcggggggagttccaagagaggacaatgagaggcgaggcatttttccaccacggagtgtgtttcagctttctgcaataccccagcggttctcaactgggttgatttttttcctcccaaggggacattcaatagtatctggagtcatgtttgtttgtaacaactggtagggaatgagtgggtgggttctgtcatctactgagtagaaaccaaggacactgctaaacatcctaccacacacaggatgcagcccccaccacccatgaaggcccaagacatcaacagcagtgagttgagaaattgcaatacatcccttccttgccccaagttccctctgtagcaggagagcaagtcagaataacagaactcaaagcctcttaaaaccccccttctcggccacacatggtggctcacgcctgtaatccccagaggcccaggtgggaggatcgcttgagcccaggagttggggaccagactgggtgacatagcatgctagatctcatctctactaaaaattttaaaaattagccaggtgtggtgatgcgtgcttgtagtcccagctacttgggaagctgaggcaggagaatcccttaagcccaggagatcgaggctgcaatgagctatgatcacaccactaaactccagtctgggtgacagagtgagaccctgtgtcaaaacaaactaactaactgcccttcccataaatcccagtttccccaatcaggtggtcccattaggcccatcttttttttctttttttttcttttttttgagtcaaagtttcactcttgttgcccaggctggagtgcaatggtacaatctcagctcactgcaacctccacctcccgggttcaagtgattctcctgcctcagcctcctgagtagctgggattataggcaagcaccaccacgcctggctaattttttttgtatttttagtagagacagggttttgccatgttggtcaggctgtctcaaactcctgacctcaggtgatccacccacctcggcctcccaaagtgctgggattacaggcatgagccaccacgcccagcctcattaggcccctcttaaccaagttctagggtgagggataagttgcttacagggttggcgtggatacagcactacaccctccccttaaaagtagggagtagacgccaagggaaactagagctatataatcccatcatcaagccttcagccctcttccaggacctgccccaaccggcctatccaggactgaaacaacagcatgggccccacctccaccccaccatatgcctgggacctagggtgtcaaattccccaggacctccaaacacttcctcctctgcccctctgagaacagcaatcctggtgcacacccacgaacctgtgggggtacccacacctccacctggcctcccagacccttgaccgcaggggctctccacccagcctagcccctggcaccagagccctggcccagctccaggttttgcattctgcccttgtgacctggccaggaggtgggtaactagggccagtttcttcttcttttttttttttttttttttttgagaccgagtctcaccctgttgcccaggctggagtgcagtggcatgttcttagctcactgcaacctccacctcccgggttcaagcgattctcctgccccagcctcccaagtagctcagactacaggcgtgagccaccatgcctggctaatttttgtattattagtagagacagggtttcaccatgttggccaggctggtcttgaactcctgacctcaggtgatccacccacctcggcctcccaaagtgctgggattacaggcgtgagccactgcgcctggcctactagggtgagtttctaaggcaggagctgagagtagacatggctagtagggtgctcaggagggcaggaggagggctgtttatgagccagtggtgggagagagtgtcattctagtctgagaggctttttccctgtggcttccagctctgcccttttcttaaacactccttcagcctcagcttggcttcagtcccaccaagtgcagtctgactcgtggagacatgagagatagagagagtgagagaccagagagatcaggagacagtgactgagagggacttacagggagatcagggagagaagcagagagaaggagaaagcccagagagcataagaaatgaagacccagagacaccaaaggagggagagacagagacacagagagacaaaaagattcagaggcagagactgtagaggcagaagcaaagcaagacacagagcatttcagagacccacggcaagagacagggaacagcatggagaactatgaaaaaataggcttccagagaaagagaaaactccagctctggagggaaagggacttagccagggccactcggcccatcagtggcagaaatggacttgaacccagagaaaaagaaacaagtgccccaaataccaaaggaacccagcccccatccctggcccatcattttgcgacagccccatgactaccccaaaaccaggcccaggctccaactggcaaagcaaaaaaaaaaaacaaagaaagaaagaaagctttgccccatcccaggagggcccccaggcgcagccccctcccacggcacctttccagctggctgtgagccctagggccgcaggaaaggtatggcaagatgatgggagggatttaaagttcacagcgagaacaagaaaagtggggttaaggaggagggtgtgggcagaaacaacttaagaacaacctctgccccaccaccccccaagcacacccagagctgcaggctctagcgcatcccagccagtgtctcctgcagctcagcaggtaaagggccccggtgagggaggcagagaaggagggggtgtctcccaagagagggtgggtcgccagctccaatctctgtctctgagactggctaggaatcttttttgctgtttcctctgagagctctcatgtccctgttctgagcactgggatttctttactggtgcttcaccaagtaggtggcttctctctctgcaatgcaaccccatggttggcaacacttgattttttcctgtcactgtttctgcctgtgcccttcctctctgtctccgtctctttctctctctctctctctctttttttttttttttttttttttgaggctggagtgcagtggttcaatctcagctcactgcaacctccacctcctgggttcaagcgattctcctgcctcagcctcctgagtagctgggattacaggtgcctaacaccacgcctgactaatttttgtgtttttagtagagacagggtttcaccatgttggccaggctggtctcaaactcctgacctcaagtgatccgcctgcctcggcctcccagagtgctgggattacaggcgtgagccaccgtgcccggcctcagtctctcttggtctgccctttgcagcctacccgtctctttgtgtggctctaatattccctgcctctcttattctctctctctctctctccatctctgtctatgtgactctgtctttgtgtatctgtttctgtctgtcattctcgtctccctcagtctctgtgtctagctctgtctctccctctctctgtccctcttaccctttttctctccatccttccatgtccctctctgtctctcagtcagtgtccatctcactgtctctccactcaatctcccttgtctttctctagctctgtgtctgtctagttctgtctctttctttctctagtctatgtcagcctctctctttctgtgatgtgctctctggctctccctatctctgtgtttgtctgtctctgtccctgtgtgtcttgatctctctttatcactgtctctgtatgacagtctcttgacagacaggtgatgatagatagataatagacagatgatacacagatgatagattatgaagatagtagatagatgatagatatagatagataatagatgatagataatagacagatcaatgatagatgatagaagaatagatagatgatggatagacagatgatagatgatagatagatagatagatgatagatagatgttgatagatgttagataatagatgagaaacaaagaaagaaagaaaaagaaaaaagaaagaaagaaaaagaaaggaaggaaggaaggaaagaaagagtgatagatgatagatggctgataggtagacagacatctgtagatatgtagatcgctcactgtttttctgtctctctcattatctttatgcatatctcttggcctctcttagtctctgttcctctatcacttgcctctctccatttatgtctctgtgtttctgtctccttatctgtctatatgttgactatctctgcctctttcctcctttctccctcccttccccatcccctggcctctccctgtctccttctctccatctgccttcatttccagggcctagggaaggtaagtcccaggggagatggaaaggagggatcagcgatgtcctctcccactttgccctccacacgccagcagctgccttcaccatggacagcataagcacagccatcttactcctgctcctggctctcgtctgtctgctcctgaccctaagctcaagagataagggaaagctgcctccgggacccagacccctctcaatcctgggaaacctgctgctgctttgctcccaagacatgctgacttctctcactaaggtgcaaggcccttagcttgggtgatggtggaaggataaggaggaggggtcccatggccacaggcccccctgtaacttctgtcttcctaccctcagctgagcaaggagtatggctccatgtacacagtgcacctgggacccaggcgggtggtggtcctcagcgggtaccaagctgtgaaggaggccctggtggaccagggagaggagtttagtggccgcggtgactaccctgcctttttcaactttaccaagggcaatggtaagcctcgtccttgtctcctccgctctcggccttttccatattgagggagggggtgagggtgagagactgttgtctcaatcttgttgacactcagggctgctgacatcactgatgacaccaaatgcaatgcagcgaggcagtgttggtctatggcaaattctctcccaccttcctcacctccagatcccaccactttcctgaattgtactcttgcaccactcctcatctccatccaaccccaaccccattgtcatcccaatccctagctctatcccaaccgcatcatcaactttccaactcagtcaagtggccccagttcccactgaccacctcaacccaatcccagtccccatcaacctttccccagtgttcaccacatcagccccaccttcatccctatccacaacactgacagcatctcaatccaaccttcattcccattatgaaccccatcccagtccccactttaaattctattatcaaccccatcctagtccctttagtcaaactgaattttttttttttatctgagatgagtcttgctctgtcacccaggccggagtgaagtggcacaatctcggcccactgcaacctctgcctcccaggctcatgcgattctcctgcctcagcctcctgagtagctgggactacaggtgcacactaccacacctggttaatgttttgtatttttagtagagatggggttttgccatgttggtcaggctggtctcaaactcctaacctcaggtgatccacctacctcggcatcccaacgtgctgggattacaggcaagagccactgctcctggcccaaactgaattctgctgctactttcccccaatcccagccccatctcctaacccaattacctattgaaatttccagttcccagttcttgctttcaatcttaaactcactaccatcaccaaaacaaccccatcacatatctacccaaccccaagttcaagctcagtcccaatctatcaatcctcctcatcctacccaactccatccacatcaccagcttcaaatacaatttatcatcaatcttataacccccttcattccccattgtcattcccaacctaacccaaactcaactccatcctcagccatccagcaattcatatcattcacttaaaacctcatctatgtcaatatcttgtccctctaaggcttggaatcaccctagtcctgtggtcttcaaactttatttatttatttatttatttatttatttatttttgagatggagtctcgttctgttgcccaggctggaaagcaatgacgcaatctcagctcactgcaatctccgcctcccaggttgatgccattctcctgcctcagcctcctgagtagctgggactacagacacctgccaccatgcccagctaatttttgtatttttagtagagactgggtttcaccatgttggccaggctggtcttgaatgcctgacctcatgatccagcagcctcagactcccaaagtgctgggattacaggtgtgagccactgcacccagccccaaactttatttcaaagacaaatctctgttcaaaggaagctatgtgacaagacccaataaatgatggaaggaaggagggaccaacagaaggaaggaggaagaaaggaaaaaggaaagaaggaaggaaaggaaggagggagggagggaaagaatgaaggaaggaaggaaggatggaaggaagccatcatgattggaaaggggatcctggagacctgcatcctggactattctctcctcacctccaaagaatgtctagggctctccctggctcctgcattagatgggtcccagctgccccaggatttgaaatcagagagctctggtacaatattacaatattacaatattgtgtattaggtacacgttccatccttcatgctcccttccctggcttgatctgatgaccttacctgtccaggtacaccagatgcaaagaggtggagacagggcacttgagaaagtcaccttgctacttttgcacagaaaacatctggatgggtacatcgtttgttaccaaaaatagccaccatctagttattcaatacacagcacagagggtaacagcagggttccaccactcactagctgtgtacccttgggccagaggcctcccttctcttcctcttagtttgctaccatgagaaaattataatagcattaactccatgttatgaggagtcaatgagacaatgcataaaaatgcaggcaatacactatagtcttttttctcttcttctttagtatctagttctctgctaggtccagaggaaccagagataaacacatctgagactttatcctatagtaggtcccagtccagtggaagacacaggcatcaccaaccagattgtgccatcccagagtggtccaggctgggatgggggaagcctggggagctatggaaaccctagagaaacacttggcccagcctagaagggaggaggagccagagaaggcttcctggaagaggggacctctaagctgaaacctaaagaatgaagatgagtattcaggagaaggcagggggtgaaagtgctctgggaaagaccagcctgtgcaaagattctgggtccaggaagagaagagacggggtctgttttgttcctggatgaattcccagtgtcctggtgcttatttttcttgcctatctctcttattcatgcatttaataatcaataagcaggccaggcacgatggctcacacctgtaatcccagcactttgggaggccgaggtgagtggatctcctgaggtcaggagtttggtaccagcctggccaacatggtgaaacctcatctctattaaaaatacaaaaattaggccaggcgcagtggctcatgcctgtaatcccagcactgtgggaggccaagacgggtggatcacgaggtcaggagatcgagaccatccttgccatgcctgtaatcccagctactggggaggctgaggcagaagaattgcttgaacccgggaggcggaggttgcagtaagctgagattgtgccactgcactccagcctggcaacagagcaagactccgtctctctctctctctctctctctctctctctctctctctctatatatatatatatatatatatatacacacacacacacacacacacacacacacacacacatatatattaggtgggcgtggtggtgcacacctgtaatcccagctagtcaggaggctgaggcaggagaatcacctgaacccgggaggcggagggtgcagcaagctgagatggtgtcactgcactccagcctgggtaacagagcgagactgtgtcgcaaaaaataataatcatcatcaataagtaatcaccagcacctcctgtgtgacaccctctgcactggacaatgctaaggacccagtggtgaccaagacaggcacccactctgccttcacagttctgtgaaggagacagccccatcaccagacagtaacagcccagagtgatcaggttcttaatggggaaacagaggcagagtgataggatggtcgtgagggaagcccatggtcctatggaagcttgaaggagacccctaagctggagggtccagaagggcttactggaaggagccagggagattccaaactctgtctctctcccagcaaataccatgaaaggggacctgggtggcagtggcctcaggatgagttcccggttaagctggtcccctcctcttctccccaggcatcgccttctccagtggggatcgatggaaggtcctgagacagttctctatccagattctacggaatttcgggatggggaagagaagcattgaggagcgaatcctagaggagggcagcttcctgctggcggagctgcggaaaactgaaggtcaggaattttttttaacaggctggatggcacgatcttttttttttttaacaggctggatggcagccttgacctcctgggcccaaaccatcctcccacctcaacctcccgaatagctggtacttcaggtgtgctccaccacacccagcttatttttaaattttttgtagagacagggtctcactatgttgcccaggccagtctcaaactcctgtgtgcaaatgatcctcttgcctctgcctcccagagtgctggaactataggcatacaccaccatgtctggccaggtctttgaatccagttcatccttataattcacatccattctacttttttttttttgagacagagtctcgctctgtcccccaggctggagtgcaatggtgtgatctcagctcattgcaacctccgcctcctgagttcaagcgattctgcttgctgactgctctgtcgcccaggctgggttgctgtgtactagcgtgtgttgtgtggcaggattatgtagctgtatgctggctttatgtgttggtgtgtggttaccgtgtcttgggatgtttccgggctggctgttaggtcactgcgtgtcgtgtgttggcatgtactgtgatcgtatttgctgggtgttctgttgccctgtgttgttgtgttccgtgatgcctgatgattgccttgtgctatgtcgcgtgctgtgtgttgtgttgccaagaatagcccgttctgtggttgggcgttgttgctgtcgatgtgctgcaggaagttgtgggttcggtgccgtctgtggcattgacagatgcttttggggtgtcgttaagcagcatgttgtgaccatgtccccgtgtttgcaccgtaagacacgttgccatggttgagtcggatgttgtacaaattaatggtgttgctgcatgaggtctggtgtgctgcacatcgcgtcttcctgatccattgcactccttaccctcaggcgagccctttgaccccacgtttgtgctgagtcgctcagtgtccaacattatctgttccgtgctcttcggcagccgcttcgactatgatgatgagcgtctgctcaccattatccgccttatcaatgacaacttccaaatcatgagcagcccctggggcgaggtcagccaactgagtccagcaggggcagggtgtggggtccgcaggatctaggaatggagaggaaacagtgggcggggaaagggctgtgaatggcccgcccagggcccgccccctcccatctgaccccacccagagttacacggccacgcccactcccctccactgagcatttatggccgccattgcctccttcccactccccctcagccccaacccccaccccggacctggctgccctttgagaccctgtccctgcctacctaatccacactgaccccattcgcccctgaacaccctttgtcctcctccaaaaccctcctactctgtctggtccccagttgtacgacatcttcccgagcctcctggactgggtgcctgggccgcaccaacgcatcttccagaacttcaagtgcctgagagacctcatcgcccacagcgtccacgaccaccaggcctcgctagaccccagatctccccgggacttcatccagtgcttcctcaccaagatggcagaggtaatccctacctggaaatcccacctctagtctgacctgaaattctcctgctgcccctgcctcaaacccacagggaccccagatggggcagggttgggggaccttctccctggagaagctgaagcatctggcccagctgggctggagccaggagccactcgcagccaccgccaacttacagctcattaagaagtcatcaaaggaggtggggcagggtggagggggcagttgctcaggcttgttatcccagcactttggaaggccgaggcaggaggatcgcttgagtccaggagttcgagaccagcctggacaatatagtaagacccagtctctacaacacatacgtacacacatacatacacacacacatacatacatacatacacacacacatacacacatacatacatacatcatacatacatacacacatacatacatacacacatacatacataaaacgtattttttaaaaaaacaagaagtcattcaagctctatccaagaagttaattgtaggccctgcagctgagattttccctgccctgcccttctccgttccccagctctcccagggaaagaaagttaaacccagctgggaccgaatgggcccccagcagcagttgtactggtctagagtgaaggggcctccattcctggctcacatccccacccctctaccaatgcaggagaaggaggacccactgagccacttccacatggataccctgctgatgaccacacataacctgctctttggcggcaccaagacggtgagcaccacgctgcaccacgccttcctggcactcatgaagtacccaaaagttcaaggtgaggcccacccacacagcagcgtggaggtgcccatgtgttccagcctcaccccagagcagggagccacggccccgcctcccaggtctgatatagcctcctgctggcaccaggattccacagccaaacccacaaacccacacggaggccgatcccaccacatggcccatgaggtccatgcagcctgcccgaatcccgacccagatcccacccgcttaattgttggtttttttgtctttgttttgttttttggagacggagtctggctctgtcacccaggctggagtgcagtggcgtgatctcgatccgctcactgcaacctccccctcccgagttcaagggattctcctgcctcagcctcccaagtagctgggattacagcctcccaagtagctgggattacaccaccacatccagctaatttttctatttttagtagagacagggtttcaccaagttggccaggctggtctcaaactcctggcctcaagtgatccacctgcctcagcctcccaaagtgctgggattacaggcgtgagccactacacccagctctgcttagttttttgtttgtttttgagacagactcactctgtcgcccaggctggagtacagtgccgtaattacagctcactgcagccccttgggctcaagcaatctccccacctccgccttatcaatagctgggagtacaggcgtgcaccaccacactcaatacactcagctaattttttattttttgtagagacagggtctcgctgtgttgccctggctggtccccaactcctgggctcaagcaatcctctcaccttggcctcccaaagtgctggggttacaggtgtgagccaccgctcctgcctccacccgcttagtcttgctttgtgccgagtgcgtcaaccaccacatgcgtccacctccggcttcagagccctgccctggagccccagccatgtgcctgccagggaaccctacctctcccatgcagcctggcccacacacacagctctgtctgctgctccacctccccaagctccatctctgggtgtatcccctgctctgcccctgatctccagccctcccacacagtccacccactcgacctaccgtccagccagtagagccccaaaactgctcctgaaatcccatcaggtcctggattccaggcctccctgaagccctgcccacacaacccaacactcaggcccttgcacaagccaagctttcgccctcactgacccacttcctcccagaccctggctaattcttttttttttttcctcttccccccccccttttttttttttttttttttttttttgagacggaatcttgctctgtcacccaggctgaagtgcagtggcctgatcccagctcactgcaacctcctcctcctgggttcaagtgattctcctgcctcagcctcccaagcagctgggaccacaggtgtgcgccaccaagcccagctaatttttctattttgttgtggagattgggtttcaccatgttgcccagatggtctcaaactcctgggctcaagcgatccgtccgcctgggcctcccaagtgctgggattacaggcgtgagccaccgcgcccggccagctctagctaattctcacgtgcgccccagcagtggcgccccgcgctgggagactttgactagacgcctccccacacacgcacacacctcttatcagcctggttgccctgtcgcgcccgctgataccctcgaccccgcttcccgcttcctctccagcccgcgtgcaggaggagatcgacctcgtggtgggacgcgcgcggctgccggcgctgaaggaccgcgcggccatgccttacacagacgcggtgatccacgaggtgcagcgctttgcagacatcatccccatgaacttgccgcaccgcgtcactagggacacggcctttcgcggcttcctgatacccaaggtgcgctaggcctggcaaacgacatcaggcaacctaagaggaggcatcgcaggctcttgcactggcaaggagtatcccaggcactagccatgaacaccccaggccttagcaactggcatcccaagccctagctacagacatctcagacccttaaatccagaagctcaggcctttgccaggaccccatctcatatcatagtggactagaccccttcaccatgacaaatccccttcctagaacccctccctggaagccctggggtctggaacttcatctggaggatcccctgggcctaaacgctattctcagggacccctccttttccccagaaaccccacatctgttcccacaaaggttgggggtttcccacatccctgccaaagtccccaataatacagcatatagcacccatcacttggaaccctagacacccacacatatttccttggcccccgattgagtcctatacccacctatacccaccccttatcaagtccccaggacacccagcccaatacaatggaaaggagtttgggagcctcccagccctcctacactgctaagtccacctcctcacccacacagggcaccgatgtcatcaccctccttaacaccgtccactacgaccccagccagttcctgacgccccaggagttcaaccccgagcattttttggatgccaatcagtccttcaagaagagtccagccttcatgcccttctcagctggtgagggcaggaatcagagtctttctggcccaatttctacctacattcctcaccctaattccacttgccaaatcctctcactccttccttccacccattctcagctttggatgcacagagacattcattcctcctctcaactctgctcctataggcaagtagtgactaaaatcctcgtgaagcaaggtggggaggttgattaataatttaacttgggactgggcatggtgactcacacctgtaatcccagcactttgggaggctgaggtgggtggatcgcctgaggtcaggagttcgagaccagcctgaccaatatggtgaaaccctgtctctacttaaaatacaaaaattagctgggtgtggtggtgggcgcatgtagtccccgctactctggaggctgagacaggaaaatcacttgaacccaggaggcggaggttgcagtgagccgagattgcaccattgtacagagagagactctgtctcaaaaaaaataatgataataatttaacagccaggggcagttgctcacacctgtaatcccagcactttgggagatctaggcgggcagattacctgaagtcaggagttcaagattagcctgaccaacatggtgaaaccctgtctctactaaaaatacaaaattagccaggaatggtggcacatgtttgtaatcccagctactctggaggctgaggcaggagaatcacttgaacccgggaggcggaggttgcagtgagccaagatcatgtcattgcactccagcctgggcaacaagaacaaaactccatctcaaaaaatgaataaataataattataataattattatttaacttgggccaggcacattggctcacacctgtaatcccatcactttgggaggctgaggcgggaggatcgcttgaggccaggagttcaagaccagcctggacaacatggcaagaccctttctctactgaaaatgttaaaattacctagatgtggtgtggtgtgcatctgtggtcccagctacttgggaggctgaggtgggatgatcacttgagctcaggagtttgaggttacagtgagtatgatcatgccactgcactccagtctgggcaacagagcgagatcctttctctaaaataaaaaatactgactagccaaaaataaaaaatatataaaaattttaaaagaaaaaaaaattgaacttgggagtggtcattgtttacctctccactgggtggcgcagttgaggtggttctaggggtttttgttttgtttgtttgttttttggctttcctctttaccctgctgaaaaactccctctttactcagtggcaggaaaagaaaaaacaaaaaactggcataataataggtaacttaccatattgcctactgtgcgtcaagtgctgcctctacaagagcccagctaagagcttatgttttcctctgggaatgtgtggcccagattccagcagggtttgcatcccatctgtcaccccctagctgtgttgccttgggtatgttactccacttctctgtgcctcaatgtccacatctataaaatggagataatactaaggcctgcctcttggagttgttagaattaattgcgatgtaatgctcagagtaatgcatggcccatggtaagctacttacagcctcactgctttccctgtgtttaccattcacagcagcctcatgaggcactattactatccctccttttatttttctttctgagacagggtcttgctgtcacccaggctagagggcagtggcacgatcatggctcactgcagccttgatctcctgggctcaagtgatcccctcgcctcagcctcccaagcagctgggactgcaggcatgtgccaccttgcacatttttaaaattttttttgtagagatgggatcttgctgtgttgcccaggctgctctcaaactcctgggctcaagggatcctcttccctcggcctccgaaaatgctgggattacaggcctaagccagcacgcccagccttcatatccccattttaaatatccagaacgtgtggtttgtccaggatcacaaaactagtagtgacagggccaggattcgaacccaagcagcccaggtcattccactccacagtttaaagcatctttcccagttctttacatgggtgaatctgtgacgtccccagctgctgtcttcctttcctcttatgttttcctctgggaatgtggggttgcagcctctaacctcatcttatctcaccgccgctccccatcctgccacccctgcagggcgccgtctgtgcctgggagagtcgctggcgcgcatggagctctttctgtacctcaccgccatcctgcagagcttttcgctgcagccgctgggtgcgcccgaggacatcgacctgaccccactcagctcaggtcttggcaatttgccgcggcctttccagctgtgcctgcgcccgcgctaacgccccggcccttccagattcgcctgtgagcgatgaggcccgcccatgcgggttgctacgtccccttcttggtccacagtctgccctcatccctctggcagtcacgctgtcttccctgcatgctgtgcctgccgcgtgcccttcccccatccctccaatctgtgccccgtctgcagggcagaggcagatgtggcatgtctttttgtacccacagagcttgttctatggcacgcccttttctaggctttttgtatcatttcttagtacattgtaatagattcaaaccagtcttggctgaattaaagtgagaatgagagtcatttaggatggggagaagggagctggctgcagagatggagacactggctagttttgccctcacctttagggtggctagggtgggacaaattgtatcctggagacaggcttgaaggtaaaggctgcgaggacctgaagccagagaggcagagaaaccaagacagagaaaaaggcagcaggaccaggtgaggtggctcacacctgtaatcccagcactttgggaggctgaggcgggaggatcgcttgaacccaggagtttgagaccggcctggcaacagagtgaggcctgactctacaaaaagtcaaaaagtggggcaggaggattgcttgatcctgggaggtcgaggctgcaatggggtatcattgcgccactgcattcccgcctgggagacgggagtgagaccctgtcagaagaagaaagaaaaaagaagaaggagagggagagggagagggaggagggggaggagggagaggagaggaagaagaagaagaagaggaggagaaggaagaaggagacagcagcgagatatcagagagaatatgcaagagatgaagggcactgcagagagatggaagcagggcaaagtgaggctaaggaacaagcactgacactaaatgacactccctatttgcacgctgttctgaatgcctcattaagtctccctatgaggcaaagccatgttttttgctttggtttgatttgggaggttttttttctttctttctttctttcttttttcgagacagagactcgctctgttgcccaggctggagtgcggtggcgcgatcttggctcactgaaacctctgcctccctggttcaagtgattctcctgcctcagcctcctgagtagctggaactacgggcatgtgccaccactcccgattaattttttgtatttttagtagagacagggttttactgtgttagataggatggtctcaatctcctgacctcgtgatccgcccacctcggcatcccaaagtgctgggattacaggtgtgagccactgtgcctggcctgtttgtttcttttataggcagggtctccctctgttgcctaggctggagtgcaatggcacaattcaaggctcactgcaaccttgaacttctgggttcagctgatcctcctgcttctgtttcagaccaccaaatagctgggactacaatcaccgtgcctggctaattttttttttttttttaatctttagtagagacagagtcttgcagtgttgcctaggctggtcttgaactcccgaactaaggcgatcctcccacccaaaaagcactgggattacaggcatgagccaccacacctggccacaaagcagtattattatcatgtttttacagatgagcaaactgaggctcagagaggtgaagtgagttgcccaaggtcacacagaaacaggcagagctgggatctaaattcagactctgaggctacagacactgcacttcttttcttttttcttcttctttcttttttttttttttttttcttccaagagaagctgtcactctgtctctcaggctgggatgcaatggcataatcacagctcactgcaatttcaacctcccaggctgaagagatccttccactttagctttctgagtagttgggactacaggctgcaccacaaccacacctggttaatttgtttttatttttattttttgagttattttttgagacagagtcttgctctgtcacccaggctggagtgcagtggctcaatctcagctcactgcaacctccacctcctaggttcaggcaatttttgtgcctcagcctcctgagcagctgggattacaggtgcccgccaccacacccagctaccttttttttttttttttttttttgtatttttagtagagacagggtttcaccatgttggccaggctggtctcgaactcttgggctcaggagatccacccgcctcagcttcccaaagtgctgggattatgggcgtaagccactgcacccagctgctaatttttttatttttaatttttgtagaggcagtctcactatgttgcccaggctcgtctcgaactcctggcctcaagtgatcctctagcctcagcctcccaaagttctggacaacccgtgcacaccaccatgccctactcagacactgcacttctaactactaccttttaattcacaagtcagagacccagaaagaaagaggcagacacccttaaatacagagaagagcagagaaacacagacactaagatatgggaggcagggggaatcgagagagagaatggaaagaaacagagaaatgaccagagaaagacagatgagcaatgacagtgggagttccgaggactgaggctccctccctcaatccccagcccctcttttcttttttttcttttttcttttcttttttttttttttggacagaatcttgctctgttgcccaggctggagtgcagtggcatgatctcagctcactgcaacctccacctccagggctcaagtgattctcatgcctcagcctctcgagtagctgggattacaggcacgtaccactatgcccagctaatttttgtatttttagtagagatggggtttcaccatgttggccaggctcgtctcgaactactggcctcaagtgatctgcccacctcagcctcccaaagtgctgggattacaggcatgaaccactgcactaggccctcccaccctctcactgaaattctctgaaattctcccgtttggagtgacgatagcaaccccaggcatgtaccctcccaacctgggacccgacctaataccctaacatcctgctgacagtggctgtttttgcggggcaggcgtcccaaagcacatcaagccagattcaagcagagtggaactggcccctcagccatcagtggaggtggcctgagaggctctaccctaaacggggtctccccaaggcgatgcagaaactgggacatgctctgctgagcatggggcttactggagtgaggcttataggcagtccccacatggggattaaggtgtcagctctttaatcccctcactgttcccatcacaggctgaccagagtcggccccagggcccagccagggacacagaggttgggggagagagggagacacagagagactcagaggtcctgagaaagacaggcagagagagatgatgcagaaaaacacctggagacactgaaaagagatggagaggaaaaggaagagacagataacgcagggatggcagagaaatcctggaaaacagagaccgggaggagaaagacagccactgagaaaagggaaagacagcgatgtccagagagaggaaagacaaagataaataaagagaacagaaatgaagagagatagagagacctgagagaaaaagaaaaagggaggaaaagaaagagagaaacagagaaatccagtctaattacaaagagatagaaacaccaaggcgggaggatcacttgagcccaggagtttgagaccagcctgggcaacataacgagacctggtctctataaatattttaaaaattagctaggcatggtggcacgcacctctagtcccagctacttgggaggctcaggtgggaggatcacttgagcccaggcagtcatggctgcagtgagctgtgatggtgccactgcactccagcctgggcaacagaacaagacagatggaagggaagggaagagaagagagaagaagaaagggaaaagaggggaggggagggaagaaagaggctgggcacggtggctcacgactgtgatcctagcactttaggaggctgaggcaggaggattgcttgagaccaagagttgaagaccaacctggccaacttaacaagaccccatctctataaaaaaacaaagagaggtagggaggaagaaaaattgggcattcattcaacaaacatttactaagtgcctactgctgtgctgagcgctattttaagtgctgggatacagaagcaaacaagacaaaatccttgctctggaagagctgacattccagaggacagcccacccgagcaaaatggaggaagagtcaggagctggggagaaaccagaggccataataaagaggatccattaaagcctgtcacagagggtggggtagggctgggggaggatgcagcttactgtgccccaccacactcccgctgtcagtggagtcagcagctctgagcaggggccctgccagacaacccatgtcagtcaccaggttccagaaaggctgacaggtaggaagacccaggacagggcaggacagaatatggaggtacaagggggtcaacatgcagaaaggcaccctgaagaaataaggagaggcacagaagtgccaggctgagacaaagggaagcacagactgggggagatacagggagaggaagacacagacatactgaaaagagagacagaaaacagacacaaacagaggcagagactgagagaaaggagagagagatgggaaaagatggaaagaggagagagagagagatgaacacagaaacatagagactgagcgtgagggaggctgggcacgctggttcatgcctatactcccagcactttgggagaccaaggcagaaagattgcttgagcccaggagttggagaccagcctgggaaacacagtgagaccctgtctcttcaaaaaatacaaaaattggcaggatgtggtggtgtgtacctgtggtcccagctactcgggaggctgaggtgggaggattgtttgatcccaggttgaggctgcagtgagccatgatcataccactgcactccagcctgggggacagaagccagactctgtctcaaaaaaagaaagaaaagaaaagaaggaaggaaaagaaagaaaagagagagagagcaagtgagactgagagatgaaacaaagagacacagagagaccctcccagagacaatgccagtcctaggctctgcacagtccccccccccccgcccactggctcgccaggtctgggccctgtgccaggcacttggaggaaggctggatttggccaagcaggggcaggcaggagggtggaccacattcctgaacagtctgttccaaatacagccccaacctcactcactgctgccaccaccgcaaccctggcccatccaggcctgagtctgccccctctagcccatgccctaggattgggggtagtgggggatagatgagagaataagggataagtttgtctgccatcatggcctggcctcagacaaggacttgggggactggataccagggggttcagcagcatgggcacagaacatttgggggcatctgggagccaatgccttgggaatagagatggtagattcagggcaggacataatatggaagtacaagggggtcaacatgcagaaagacaccctgaagaaatagaggcacagaagtgccaggctgatggacacccagaagccagggaaattgaaggcagatctggggaacaagcgtagcacacagggtcccaagagcaatggaagtgacaagggctcaggtgtgagctcctaggaatcacaggcacagagcacaggagtgccaggggtgtctttagaagtgtatttgagccaggagcagtggctcacacctgtaatcccagcactttgggaggccgaggcaggcggatcacctgaagtcatgagttcaaaatctgcctggccaacatggtgaaactccgtctctactaaaaatacaaaaattagcagggcctggtggtgcacgcctgtaatcgcagccacttgggaggctgaggcaggagaatcttgaacctggtaggcggaggttgcagtgagccgagatcgcaccactgcactccagcctgggcgacaagagcgaaactctgaaaaaaaaaagaaggagaagaaggagaagaagaaggaagaagaagaagaagaagtgtatttgagagtcggtgtgtatttaggaatcagaggtacagggtacagcgttcagggggcccagagatggcccggagattgaggaatacacacctacaggccaaataaattggactcaaaggtgctaggggctcaggagggtgcacctgttggccaggtgtgttgacatgaaaatgctggtgtacgaaagatgttaagtggggcaggctgaggcaggcacaaaaaaaaaagccaggaggagccagggcacagttccaccagggctgggggtgggctggagacgtcgggctggggaatccatggaatgagcagccctgagatgcccactcctcccacatcgggtctctgcccctgctccacccaagaccccttggaaatcaaatagaggtgcaggcgtggagaattgcaggcatgatgatcgcgggtatcgctgcgctgctgttgtggcttctggtgctggtgccggcgtggtgggggtagggtgggtgccgcgctcagatgcgggggtccctacctccccggcccaggctgctcccattgctggggaacttgcagctgcagtccggaggcctggaccgcgcgctccattcccgacaggaatgggggaacggaattctggattcgtggaggtggggctggggactagaactcctcctgaacgaagacagctgagggcttgtactctatgatcttgaggaaggacaggaaggatgagtgctccggactgctgagtactaggaaaggagaatagggagtggagagcctggggccgggacactgggtcgtaaggaaggagcccagagcaggaaatcaggttgtgggaagaggggagcagggggtctgttctcctggttcagggtggggaggtactgagggcccaggagacactctgagggtacaggaggttgggaatctggacttctaggtcccaagggaagaaggaagtgggggcctggactcccgcatctcagggaggaaggagctggggatctgaattcctggacctgaggaatgagggtctgagacgaggactcctgggtctgaaggaagagggagctgggggcaatggctccgatgaggaaccctatgggcacccgctgagcaccggctacccgtagctctccggccgctggggccgggtgttcacagtgcggctgggcccgcgccctgcggtggtgctgtgcggctacgcagcgctgcgggacgcgttagtgctacaggcggatgcggtctccggccgcgggtccatggcagtcttcgaacgcttcacacgcggaaacagtgaggccccggcgctggacttgccggtccggacgctccaggctgggcgggtaaatggtagaggcgggcaaatgggggcggggcctaatagagactccagctaatgaggtgcaaacggccgagagagggcggggcggcgctaaagcgtaaggttagaatggaggttcatcctgcagccaacaggagaaaagagcctaagattcaaagtcccagagccagcctaggtcagggatggagcccagcaaaggcggggccaatgtgtggatagggcacttggaggtctggtaaggcagcaaaacgaacgaagccggccgcaggagtcggaggccccgaaagggatgtagccagtgacccggcgcttcctggatggggcgtggccggttcccgggcccgcctcctttcccgtccccaccacaggaatcttgttttctaaccggccgtgctggtggacactgcgcaattttgcacttggagcgccgaagaagttcgggttggatacgcggaccatcgaggcgcgtgtcctggatgaggcggcttgtctgctagacgaatttcaagccaccattgcttcggcctggccgggagagcggaagggcctggtgtgggagagtcccttgcactgccaagacggggccactggaaggtatttgggtggaagaaagccagtaagcccatggggctggctgggggcaggaccacgcgttatgaccaccgtcctgttcctacccccaggagccccgtttgaccccgtgcggctactgggtaatgctgtatccagtgttacctgttcttgtcttcgggaaccgctatggctacggggacccggagttcctgaggtcctgaacctcctaagtgacaacttccgcatcatgagttccaaatggggcgaggtgagagggccggccacaatctctcccttgtgcgtccagccttatgccaaatcccgagtacacagacgtacctacaatgggacagttagattcttggaagagttctagaacctccaatatcaaagtccctgtagggaaactaaggcctagtgggcatgtccagggcccttgttgagaccctgtctctccagatgtacatttgcctgtctctcatggactggctcccgggcccgcaccaccaaatcttccaaaacttttcagagctgcaggtcttcatctctgagcaaatccaacaacactggcacatgaggcagccggcggagccccgcgatttcatcgattgcttggccagatgggtaaggcatgggtcccagctccctaaactctatccatgccgcccaccaacaggtgcctggcgcgcggcagcccatcttctctgcccacagaaacagcaagacccagagagccatttccaggaggagacgttggtaatgacgatgcaacttttttttttttttttttttggtggcacagaaaccacgagcaccaccctgtgctccatatgggctcctcattctgcttaagtacccagaggtggcaggtctgcgagccagagagacccagaatgggaggctgcggtttggagatggctggagggtcccggaagtgcacagcctccctctgccccagccaaggggcaggagctggaccctgtggtagggcagaggcctgtcccaagcccggacgaccacgtgcaatggccctacaccaacgcagtgctgctggagatccagcgcttcatcagcgtggtgccgcgcaccctcaccctcgacacccacctgcacagccactgtctggccaaaggtgcccactgagtctggagatcctgtgtggggccccgatgcatgagcgtattccgagatcagccagaatcggcaggtgtgcgctgtgcagacccaaacacaatcagttacccctggagcaggaaagtagacctgccttcccttcagcatttttttttttttttgagatggcatgatctcggctcactgcaacctccacctccccaatacaagtaattctcctgcctcagcctccctagtagctgggataacaggcacccaccaccacgcctgtctaatttttgtatttttagtagagacggggtttcaccatgttggccaggctggtctcaaactcctgacctcaagtgatccatccttctcggcctcccagagtgctgggattacaggcgtgagctacccacccagcctattcccttgggcttttaaaaagccatttcggccaggctggtcctgaactcctgccctcatgtcggccaggctggtcctgatcttcccacctcggtctcccaaagtgctgggattacaggtgtgagccaccgtccatggcccatgatgttgttttgaagactcagtgaggacatgtgtgtactagacttggcacacaagagttggtcaaatacatttactgctccccacccttctaataaaccaaatgcagctgtgggatagtagggggaggcactgggatagctaagcagggaggggatcctggggctccagggatgggcagagactcagatgctcagatctggtatggagccccatgactgaaccccactgagattttgggttctttaatacaacagtgaacctttcaatgaccatgaaggtgtctcagcctcctgagtagctgggattacaggcgcatgccaccatgcctagctaatttttgtatttttagtagagacggggtttcaccatgttggccaggctggtctcgaactcctgacctcaagcaatccacccgcctcggcctcccaaagtgctgggattacaggcatgaaccaccacacctggccaagactccaactcttaaacaaacaaaaagacactcatattggattcaagcccagctaatgacctcatcttagcttgatcatctgcaaagaccctttccccaaataatatcacattcacaggtcctggggttgaagatttcaatatcttttgggagcacaaaattcaaagtataacaatgatggagatgtagagaaatggacatgttccaaagacatttaggaggcaaaatcaatgactcagggatgggttgcttatggccagttggggaaagaaatgtgttgagcatgaacctggaacaatggaacagatggaaattttcttagtagagatggggtttcaccatcttggctaggctggtctcaaactcctgacctcaagtgatcagcctgcctcagcctcccaaagtgctgggattacaggcatgagccaaacactcctggcctcagatggaaaatttccaaacacacacagggctgggggctgctgtggtcttgccaactgctccaggcatgcatgttgggggccacagcatccctgtccgtggggatgtcatccagaacagtccctgcccctggaaaggtggaaactgcaagaggcacccccattacagactgaatccaggaaccttacaacgaatatttgaaacttaaaaatagagactcttagcgctgtgggatcataaacttatagaataataatggttaacatttacagagcccatctagatctgagcattgcactgtgcaatttacatttatgaccttatttaaccctcccattgccttccaagtcagagatccccattctctaaataaggaatagctcagagggagaatggtctctgggatctccagggttagaaagtgacagatttgggccaagcacagtgctcatgcctgtaatcccagcactttgggaagccgaggcgggcagatcacttgaggccaggagttcaagaccagcctggccaacatggtgaaaccccgtctctactaaaaatacaaaaattagccaggcatggtggcgcacgcctgtagtctcagctactcaggaggctgaggtgggagaatcgctgaaacctgggagacagaggtggcagtgagccgagatcatgccactgtactccagcctgggtgacagagcaagactctgtctcaaaaaaaaaaaaaaagtgacagatttggattcaaccctaggtctgcccatctccaaaacccttaagcaatagctttccttgcactttcaacaacagtcacagcaagaatgctctcattacaggccaggcatggtggctcacacctgtaatcccagcactttgggaggctgaggcaggcagatcacttgaggtcaggagttcgagatcagcctggccaacatggtaagaacggtctttactaaaaatgcaaaaattagccaggtgtggtggcgtgtgcctataatcccagctactcgagaagctaagggacgagaatcacttgaacccaggaggtgggggttgcagtgagccgagattgtgccactgcactccagcctgggcaacagagtgagactccatctcaaacaaaaaaaaaagctctcattacagagcctgctgtgagccggaactacctaaatatttgacaggcattgtacagcttggcccccatttcgcagatgaagaaaccgaggctcagagatgctaagccattttcccaaagtcaccagcaagtagaatgcccaaggtgtggcttgaatccaagactgttgtctctctccaaagtccacctcagagcagtggaagggaccacctcacctaccctgacacttgaagatgaaagaagtgtggaccacagaaggaaagacctcatgcaagatccacagcaaaccatggccaagggaactgggatggcaatggggaagaagtagagctcttgcatcagagccctgtatctgagccaagggtggtggctcatgcctgtaatcccagcactttggaaggctgaggcgggcggatcacgaggtcaggtatttgagaccagcctggccaacatggtgaaaccctgtctctactaaaaatacaaaaattagctgggcatgatggtgtgtgcctgtaatcccagctactcaggaggctgaggcaggagaatcgcttgagtttgggaggtggaggttgcagtgagccaagatcaggccatcgcactccagcctgggcaacagagcaagaaaaaaaacagccctgtatctgtagacatttctctgtgtatctctctcacacccttcttgagaaggacataaaatctgtggacaaagcaggtgtgggcccttaatctcccaaggaattcttctgaactttctttgagacagaatctcactctatcacccaggctggagtgcaatggagccatctcggctcactgcaacctccaccttctgggttccagtggttctcctgcctcagcctcctgagtagctaggattacaggcatgcgcgacacctggctaatttttgtatttttagtagagatggggtttcgccatgttggccaggctggtctggaactcctgacctcacgtgatctgcctgcctcggcctcccaaagtgctgggattacaagtgtgagccaccgtgccccacccacagggttgttttgaagacttagtgaggacatgtgtgtcctagacctggtacacaagagttggtcaaatacatttactgctccccacccttctaataaaccaaatgcagcactgggatgtcggggggaggcacagggatagctgagcaaggaggggatcctggggctccagaggcaggcgggggactcagatgctcagatctgatatggagccccatgactgtgaaccccactgaggttttgggttctttaatacaatagttaacccttccttgactatgacacccaggagccatcctagcctagcccttggactccatctggtgccagaatggcccagggcttggatatctcaaaatatcagctgacaacaggtcagtaaatattctgagaaaatgaaaaatggacaacctgaaccccaagccttgcttccgcctgaacgctgacccagacttcggtcacattctgagaccagattcctggtcactcagtgagcactggacctggaccacccatccaagctactgactccacgctgatcctggccacagcgtgagccatgaaaggcacctcagggagaaggaacagcaagaggaaagggcaggaggcttggaactgtgttgtgtttggctagaggtaacaagagaaaaagtttagcccagagggtccatcggggaaaattttgggacatggaccatgagaggtcctttggattcttagaaatatctctgaatgtcccaccaaggagttttgactttttcctagggcctttggaaccacaggagatttaaagtaggggaagtcacaatcaaatctgtgctgtagaaaaatcactctgaaaccagacacggtggctaatgcctgtaatcccagcctgggtgacatagcgagaccacgtctctacaaaaaataagaaaattagctaggggtggtagcatgagcctgtagccccggctactcaggagactaaggcaggaggatcgcttgagcccaggagttcgaagctgtagtgagctgtgattgcaccactgcactccagcctgattgacagagcgagaccctgtcaaagaaaaaagaaagaaaggaaaaggaaggaaagaaggaaggaaggaagggagggagggagggagggagggacagagggaatctctggaccttgaggggaatccacagaactggatctgctgacagatgttggctaagttaccaatggctcatgggaacaaggatatctatcaggacatctacaggaaaacagcctgaaaaatgtccatattaattaaggtaaagaccaggttgttgtaaccaacagatcccaaaatgcaatcattcaaataaaatacaagtttctttctttcttttgtgtccctcttgaagtagacagttagtccagcactgcaaggtggttcccctccttgtggtcaatcatggacccagattccttcaaactcgttgctctgctatagttcagtggttctcaaagtgcagcctccagacctgcagcatcagcatcaccttggaactttttttttttttttttttagacagacagggtcttgctctgtcacccaggctggaatgcagttatgcgatatcagctcactccagcctcaacctcctgcacccaagcaatcctactgccttagcctcccaagtagccaggactataggcatgcaccacacacccagctatctgaaacttgctaaaaactcaaattcttaaaccccaccccagacctactgaatcagaaacccaaaacctgtgttttaacaaggcctgcaggcaattctgaggcatgttctcagcagagcatcactaccctacagtattatcatgatcttcatggtcaaagagcagaaggttttgtacagcttttccccccttttttcttttctttttttttttttttttttttttttttgagatgcaatttcactcttgttgcccaggctggagtgcaatggcacaatctcagctcactgcaacctccacctcccaggttcaagcaattctcgtctcagcctccggagtagctgggattacaggcatgcaccaccacacccggctaggttgtatttttagtagagatggggtttctccatgttggtcaggctggtctcaaactcctgacctcaggtgatcctcctgcctcggcctcccaaattgctgggattacaggcatgagccaccaagtctggcccccttttttcttttctttccttttctttctttttctttcttttttttttttttttgagatggaatctcactctgtcacccaggctggagtgcagtggcatgatctcagctcactgcaatgtccacctccccaatacaagtaattctcctgcctcagcctcccgagtagctgggattacaggtgcacaccaccacgcccagctaatttttgcatttttcatagaaatggggtttcgccatgttggccaggctggtcttgaactcctgacctcagatgatccacacacctcggcctcccaaagtgctgggattacaggcgtgagccactgcacctggctggttttctacttcttgagtcatccactccagtacagaagatggaagggatggaagacctctggctgttcaaagacctcggacccagaagaaacttgaattttgggcacacaacatgggttacgagggtgagggagtccagtctagcataatggtgagtaagatgggtcctggagacaggctaccttattttaaatcccaaatgtgtgactttccacaagtaacatctccttgagcctcagttccctcttccataacaggggaatcatgacagtattatctgtctcatggtgttgctatgagaattcatggtgttatgtccctgacacgtaacaagccctcaagtgttagtttaatattagtcttaacattttaaggttgataggagtgtctttttgtgccaagccttgcgttaaaggattttctacagtatcacattgaatcctcatggtgtatccatcatgattgctgtatgttatacagagataggttttgttaaaatactcattttataaaggaggaaactgaagggcagactggtgaagtcatttatatatatcaaaggaaatatagattgtaggtgctggaactggaattctaactcaggtatgattgacgtagcctcaagtcttcatcacctctcaagaaaaccagctttctccccggcatggtggttcacgcttgtaatcccagcactttgggaggccaaggtaggtggatcacaggtcaggagctcaagaccagcctggccgacatggtgaaaccccatctctactaaaaatacgggcgtggtggcaggcgcctgtaatcccagttacctgggaggctgaggcaggagaactgcttggaccctggaggcagaggttgaggtgactcgagattgtgccactgcactccagcctgggcaacagagcgagattccgtctcaaagaaaaaaaaagtaatgaaatgaataaaatgagtcctagagccagtaaatgtcgtaaatgtctcagctagtcaggtagtaaaaggtctcaactaggcagtggcagagcaggattcaaattcagggctgttgtgatgcctccgcagactctgagcgccacctggtggtaatttgtctgtgcctcttctgacgtggaagaacagcaactaacacactaacacggcatttactatgggccagccattgttctaagtgctttacttagatttagctttttttttttttttttcttttttgagatggagtcccactctgtcttccaggctggagtgcagtggcacaatcttggctcactgcaacctctgcctcccgggttcaagcgattctcctgcctcagcctcccgagtagctgggattacaggcgcctgccaccacgccaggctaattttttgtatttttacaaaatacaaattactaattttttgcattttcaccatgttggccaggctggtcttgaactcctgaccccgtgatctacctgccttggcctcccaaagtgctgggattacaggtatgagccaccacgcccggcccatttaatttaaattaatttatttaatccctccccttaacaacccgctaaagcaggtaagttataatcggcaccccttccacttttcaccctttttttctttttcatttcaatattttttggggaaacacttggtttttggttacatggataatttctttagtggcgatttctgagattttggtgcacccgtcacccgagcagtttacactatacccaatgtgtagtcttttatccctcacccccctcccacccttcccctctgagtccccgaagtcctctatatcattcttatgcctttacatcctcatagcttagctcccacttataagtgagaacataggatatttggttttccatttctgagttacttcacttagcataatggtctccaactccatccaggttgctgcaaatgtcattactttgttcctttttatggctgagtagtattccttggtgaatacctactactttttttttttttttagacggagtcttactctgtcaccaggctggagtgcagtggcgccatctcagctcactgcaacctccacctcccaggttcaagtgattctcctccctcagcctacaggcacgcgccaccacacccagctaatttttgtatttttagtagagacagggtttcaccatgttggccaggatggtctggatctcttgacctcatgatccacccacctcagcctcgctaagtgctgggattacaggcttgaatgagccactgcgcctgcactacattttctttatccactcgagggttaatgggcatttaggtttgttccatatttttgcaactgcaaattgtgctgctataaacctgtgcatgcaactgtctttttcatacaaagacttattttcctttgggtggatacccagtagtgggattgctagatcaaatgatagttctacttttagttctttaaggaatctccacagtgttttccatagtgattgtactagtttacattcccgccagccgtgtaaaagttcccttttcaccacatccatggccaacatctatatgttttgattttttaattatgatcattcttgcaggagtaaagtggtatctcattgtgtttttcatttgcatttccctgataatttgtgatggtgagcatttttttcataggtttgctggccatttgtatatcttcttttgagaatcgtctattcatgtccttcactttttacttttatttgaaaaaactgttttatttgtggatgatatcaaacatacacaagagtagatataagactacatgcagccgggcgcagtggctcacacctataatcctagcactttgggagaccaaagtaggcagatcacttgaggtcaggatttcgagaccagcctggccaacatgatgaaactccgtctctactaaaaatacacaaataatttgggtgcagtggcacgtgcctgtaatcccagctactcgagaggctgaggcatgagaatcgcttgaccccgggagtcagaggttgcagtgaaccgagaacgcgccactgcactccagcctgggtgatacagtgaggctcagtctcaaaacaaaacaaagaaaagtatatccatcacccagcttcaacaatgatcaactcatggccaatcttgtttcatctgtgctcccaacaacctccttccccaactccccaaaaattgggattattttgaagcaaagcccagacctcgcataaattcacctataaatgttttcaccacatatctctaaaattatcccattttaccactggggaaactgaggcatgaagaaatcacataacttaatcaaggtcacttttctgataggagttcagagccaggatcaaagcccagctctctggttctagagcccttgcctttgactgtcttgatgcctctggaatcttagatgagagtcttttttttttttttttttttggaaagacagggtctcactgtattgcataatcttggctcactgcaacctccacctcccagtttcaagcgattctcctgcctcagcctcctgagcagctcagattacaggcaccagacaccacacctggctaattgtttgtgtttttagtagagatggggttttgccatgctggccaggctggtctcaaactcctgacctcaagtgagccacccgcctcggcctcccaaagtgctgggattacaagcatgagccaccatgcctggatgcctatatctattatggacatgtctcagtaagctgtgtgcttaaaagctttgcattctactgtatgtaggtgatacctaaaaatgaaggcaaaggagaacagattaagtgtcatatattcataacacgaattagtataaagcaaggaaaatgaatgaacaatatacaataaacaggataaatctaagaaacataattttgagcaaaggagccagacgtaaaacaatacgtattacttgttccttttgtgcaaagtgccccaaaacaggcatttaattatgcatacttaggaagtgaaatgctaaaccaatcatgaaatgctaaaatgctataaaagtgtaaaaaaaatcctttccattggaagaagggaggggatagtcatgggagaaacagtagcaggcatctggcatgtaggcaacattctgtctcttaacctgggtgtacacttggtatcaattcattgagctatattcatttgttgtatgccctttttgtattgacatttaaaaatatataattccccggccgggcacggtggctcatgcctgtaatcccagcactttgggaggccaaggagggtgaatcacgaggtcaggagttcaagaccagcctagccaacaaggtgaaaccctgtctctactgaaaatacaaaaattagctgggcatgatggcttatgcctgtaatcccagctactcgggaggctgaggcaggagaattgcttggaccaggacccgggaggcggaggttgcagtgagccaagatcgcaccactttactctagcctgggctacagagtgagactccatctcaaaaaaaaaaaaaaaaaaaaaaaaaaaaaaaaaaaaaatatatatatatatatatatatatatatatatacacacacacacacacacatatatacatatgtatatataaaatttcccatcacatctgaatcatgaaatactaagagatacatttaataaaatatgtgcaaaaccagtacactgaaaaccacaaaacattaaagaaggaaacagaataagacttgagtaaggggcgagatccaccatgttcaagaatcagattactcaatattaagatattagtgctccagcccaggcgcagtggctcacacctgtaatcccagcactttgggagcccgaggcgggtggatcacttgaggtcagaagttcgagaccagcctgggcaacatggtgaaaccgatctctactaaaaatacaaaaaaattagctgggcatggtggcacacacctataatccctagggagactgaggtaggagaacagcttgaacccgggaaatgaaggttgcattgagcagagatagcgccactgcactccagcctgggcaaagagtgaaactccatctcaaaaaataataatagtaataaaagataatagtgttcatctgtagagtaaatgaatcccagacaaaattgaaataccagcaagctttatttatttatttatttatttatagaaattgtcaagctgaggctacaatttatatggcaatgtaaaggatcaacaagagccaaacatcttgaaaaagaaaaaccagactgggcgcagtggttcacacctgtaatcccagcactttgggaggctgaggcaggcagatcacctgaggtcaggagttcaagaccagcctggccaacatggtaaaccccatctctactacaaatacaaaaatgagccaagtgtggtggcgcacgcctgtagtcccagctactcaggaggctgaggcaggagaatcacatgaacccaggaggcagaggttgcggggagccgagatggtaccactgcactccagcctgggagacagagcaagaccctgtctcaaaaaaaaagaaaaaaaaagagaaaaaccaggctggcacagtggctcatgcctataatcccagcactttgggaggccaaggcgggcggatcacctgaggtcagaagttcgagactagcctgaccaaaatggtgaaattccgtctctactaaaaatacaaaaaattagccgagtgtgggggcttgtgcctgtaatcccagctacttgggaggctgagacacaagaatcacttgaacccgggaagcagaggttgcagtgagctgagattgcaccactgcattccagcctgggtggcagagtgagactcccactcaaaaaaaaaaaaaaaaaaaaaaaaaaaagaggccgggcacagtggtttatggtttatgcctgtaatcccagcactttgggaggccgaggtgggtggatcacgaggtcagaagatggagatcatcctggttaacacagtgaaaccccgtctctactaaaaatacaaaaaaattagccaggcgtggtggtgggcgcctgtagtcccagctacttgggaggctgaggctggagaatggcgtgaacccaggaggtggagcttgcagtgagccaagatcgcgccactgcactccagcagcctggacagagtgaaacttcgtctcaaaaaaaaaaaaaaaaagaaaaagaaaagccaaatggaaggatttatattaatatcaaaatttataataaaactacagtaataggctgggcactgtggctcatgcctgtaatcccaccactttgggaggccaatgcaagagcccagaagttcacttgagcttagaagttcaagaccagcctgggcaatatagtgagaacccatctctacaaaaacttaaaaaactagccaggcatgatggcatgtgcctgtggtcctagctattcaggaggctgaggtgggaggaccgcttgagcccaggaggtctaggctgcagtgagtcatgatggcactgctccactccagcctgggtgacagggcaagactctgtctcaaaaaaacaaaaaaccacacacacacactacagtaataaaggcaaggtgtactgggattccgatagaaagagatgaatggaataaactaggaagtccataaatatgtggtcaatagaatttttttttcttagagttgggggtctcactgtgtttaacaggctggtctcaaactcttggactcaagcgatcctcctgcctcagcctccctcacctgctttcaattgattactgacaaagatgctaagataattcagtggagaaaagacagtattttctttttctttttttttcttttttttttttttttttttttttgaggagtcttgctctgtagcccaggctggagtgcagtggctcaatcttggcttaccgcaaactctgcctcccgggtcccagttcaagcaattctcctgcctcaccctcccgagtagctgggactacaggcatgcatcaccatgcccagctgatttttgtatgtttagtagagacggggtttcgccatgttggccaggctggtctcgaactcctgaccttgtgattcacccaccttggcctcccaaagtgctgggattacaggtgtgagccaccacacctggccagtattttcaacaaatggtagaatgactaaatagcctcatggaaacaaaacgaaccctgccttttacttcacatcatacacaaaaattaacttgaaataggtcagagatctaaaagtacagactaaagctaaagaacttctaaaaacatattttcaaaaccttgaagtagatctttttttttttttaacatgggactcaaaaatcactaatcataaaggaaaaaattgacaaactggacttagtcaaaaataatactttcagccaggcacggtggctcatgcctctaatcccaacactttaggaggccaaggtgggaggattgcttgaacccaggagttctaaaccagcctgggcaacgtagtgagaaccagtctctatatttaaaataaataaataaataatagtagtacttttgctcatccaaaaccagcattaagaaaatatacggaccggccaggcgtggtgactcacacctgtgattccagcactttgggaggccaaggcaggcagatcacccgaggtcaggagtttgagacctgtctggccaaaccccatctctactaaaaatataaacattagccgggtgtggtggcacacgcctgtaatcccagctactcaagaggctgaggcaggagaattgtttgaacccaggaggcaggggttgcagtgagccaacattgtgccactgcactccagcatgggcaacagagagagactccatcaaaaaaaaaaaaaaggaaagaaaggaaaagaaaagaagatatatagaccaggcacagaccagaagaaaatattcacaacacatatatctcacaaaataacccgtgcctgaaatatctaaacaactcctatggctcaataaaaaaaaaaaaaaaaaagcccaaccagccgggcacggtggctcacacctgtaatcccagcactttgggagaccaaggtggggtggatcacgaggtcaggagatcgagaccatcctggctaacatggtgaaaccctgtctcttctaaaaaaatacaaaaaattagccgggcatggtggcacacgcctgtagtcccagctactcgggaggctgaggcaggagaatggcgtgaacctgggaggcgaagcttgcagtgagccgagatcgcgccactgcactccagcctgggcgacagagtgagactgcgtctccaaaaaaaaaaaaaaaaaaaaagcccaaccaaaaaatggccaacaggctataaaaaggtgtttaatgtcattagccaacaggaaacacaaattaaaaccacactgagataccaccacacacccataagaaaggctaaatggaaatatgcaaacagcacctagtgctggcaaggatcaccagaactctcgttcatgactatgggtgtataaaacgtacaactgcttagaaaaagtttctgcaaatttcttaaaagtttagcaggccaggcgcagtggctcgtgcctgtaatcccagcactttgggaggccgacgcgggtggaacacgaggtcaggagttcgagaccagcctggccaacacagtgaaaccccgtctctactaaaaatacaaaaattagccagccgtggtggcaggcacctgtaatcccagctactcaggaggctgaggcgggagaattgcttgaacccgggaggtggaggtggcagtgggctgagaccacaccattgcactccagcctgggtgacagagtaagactccatctcaaaaaacaaacaaacaaaaaagtttggcaggccagaggcggtggcttactcctgtaatcccagcacttggaggatcacttgagcccaggacttcaagaccagcctgggcaacatcaggagaccctgtctctacaaaaacatgaaaactagccgggtgagatggtgtgcacctgtaacccagctacttgggaagctgaggtggtaggatttcttgagcccaggaggtcagggctgcagtgagccagagattgcaccactgcactccagcgtgggcaacagaacaagaccctgtctcaaaaaaaataaaattagcatcacgcaacaacatagatacatttcaaaaacattgtgctgagtaaagcaagtcttgcacacaagagtacttatggtataattctggttatttgggctgccgaggcaggtggatcacctgaggccaggagttccagaccagcctggccaaaatggtgaaaccccatttctgctaaaaatacaaaaaattagctgggcatggtggcacatgcctataatcccaactgctcgggaggctgaggcaggagaattacttgaacccaggaggtggaggttgcagtgagccgaggttgcaccaccgcactccagcctgcgcaacaagagcaaaactctgtctcaaaaaaaaagaaaaggaaatgctggttatttaacgttctataacagacaaaactaacttatgtggggaggtgggacaaaagagttgttgtttctgagacactgactgagaagggacatgaggggactttttgcggtgatgatagtgctctatcttgatgggtgtttttattatacaggtacatgcatttttcaaagcacatcaaaccatatagttatgatttatgcattttattctatgtcaattttaccttgaaaacataaagattcaattttaggtaatgatattgatattcaagtgtctgggggtgaaatgtactggtgtctgccatttctatcaagaagcatcagaaaaataggcgaggtgcagtggctcatgcctgtaatcccaacactttgggaggccaaggtgggaggatcacttgaggtcaggagttcgagaccagcctggccaacaagatgaatcccgtttctaccaaaaaatacaaaaattagccgggcgtggtggtgcatgcctgttgtcccagctactcgggaggctgagatgggagaatcgcttgaagaaaaaaggcctggcgcggtggctcacgcctataatcccagcactttgggaggccaaggcaggcagatcatctgaggtcgggagttcgagaccagctagaccaacatggtgaaaccccatctctactaaaagtacaaaattagccgggcatggtggcacacgcctgtaatcccagctacccgggaggctgagacaggagaattgcttgaactagggaggcggaagttgcagtgagctgagatcacgtcattgcactccagcctgggcaacaagagcaaggcacggtggctcacgcctgtaatcccagcacattgggaggttgaggcgggcggatcacgaggtcaggagatcaagaccaacctggctaacacggtgaaaccccatctctactaaaaatacaaaaaaaaattagccgggcgtggtggcggggtcctgtagtcccagctattcaggaggcggaggcgggagaatggcgtgaacccaggaggcagagcctgcagtaagccaagatcgcaccattgcactccagcctgggtgacagagcgagattccatcccaaaaaaaaaaaaaaaaaaaaaaaaaaaagcaagggcgaaactcaatctcaaaataaataaataggtgcagtggctcatgcctgtaatcgcagtgctttggaaggctgaaatgagaagattgcttgaggccaggagtttgaggttacagtgagctgtgatcactccatggcactccagcctgggtgacaaagcaagaaatacaaataaaataaataataaggtggtttggtgggagggtagaaggatagatatgacaaaacaaacatgggaaaatgttcattgtagaatctaagtgatgagtatgtgggtgtttattatacaattctttaaacttttctttatgtttgaaattttttcctaatagtgttgggagaaagtaacatctattctgtgagccagttatttctccctttggtatttatccaagagaaataaaaacttatgtctacataaaactttgtaagagaatgttcatcccagccgggtgcgatggctcacgcctgtaatcccagcactttgagaggccaaggcaggtggatcacaaggtcaggagatagagaccaacctggctaacacggtgaaacccaatctctactaaaaacacaaaaaattagcccggcgtggtggtgggcgcctgtagtcccagctacttgggaggctgaggcaggaaaatgacatgaacccgggaggcggagcttgcaatgagctgaaattgcaccactgcactccagcctcggtgacagagcgagactccgtctcgaaaaaaaaaaaaggaatgtttatcccagctctattattggcaagagactgtaaacagctcagatgtccatcaacaggagaatggataaacaaactcaaactgtgctttatttatacaatggactcctactcaactattgaaaaggaatgaactactaattcaaactactaaaaggaatgaactactaacacactaataacgtgagtgaatctcaaacattttgctaagtgagattcaaaaaagggtgtattatatagaattctagtcacaggaaactctagaaaaggcaaagctaatctgtggttctagaaatcacaacagtgcttgcttttcaagtgcttatgaattgggaaaaggcatgatgaatgcttctatggtgatgaacacgttctgtgtcttgagagaaatttgggttacatgggtgtatgcctttgtcataattgactgaactgtaaacctgtggatttcatggaatgtaaattatacccttttaagaaagctgattataagtgggaaaggattctgcacatgctaaaccagataatttgtcacatagtgctttgtaaggctatgtgtatcggtatggaaacactaacagagatcctagatatattgctagatcaactttctagaagttgttcaaattattggctctgttggactaaactaaatgaagcttagttttgttgatataatatatagttgatatcatagatttgttgatgtaatgtagaggaagaaatccaaagactgaggccaggcatggtggcttacgcctgtgatcccagcactttgggaggctgaggtgggtggatcacctgaggtcaagagttcgagaccagcctggccaatatggagaagccccatctctactaaaaatacaaaattagccaggcatggtggcgcgtgcctgtaatcccagctactcaggaggctgaggcaggaaaatcacttgaacctgggaggtggaggttgcaacgagctgagatcgcaccactgcactccagcctgggcaacagagcaagactccatctcaaaacaaacaaataaacaaagactgatataataaatgttggagagtacctgttaagtttagaagatcatacacaccctaacaatatctcctaaggaaacatgcctttcacaatgacattgagaaatatactggcatcagaagcactagcatctttgaaaagccctgtaacggctggtatagaggtaaaaaaattcagatggctcatttcagccattgaaatgggttcccttattccaactggaatggcacattccaggacaaaagataggaaattaaagatttgacagacaccaaacaagacacacagatagcaaaaagcacatgtaaaaatgctcaatatcacaagtaattagggaaattcaaatttaagccacaatgagataccactacataactatccaaacgactggtcatatcaaatgttggccaggagagggaggaactggaactctcatgcactgccggtggaaatgtacaatgaatggtacaaccatttttggaaaacagtatggcagttgctcaaaaagttaaacatacctttatgatccagccccttccctcctatttagtcaagagaaatgaaaatatatgttcatataaaaacttgtggcagggcaaggtggctcatgcctataaccccaacactttgggaggatgaggcgagtggatcgcttgagctcaagagaccatcctgggcaacatggcaaagccctcatctctacagaaaatttaaaaattagccaggtatggtggcgcccgcctgtagttccagctactcaagaagctgaggtaggaggatcacttgagtctgggagatcaaggctgcagtgagctgtcattgcaccactgcactcctcctggggtgacagagcaagaccctgtctcaaacaacaacaacaacaaaaacttgtagtctgggcgcaatggctcacacctgtaatcccagcactttgggaggccgaggtgggtggatcacgaggtcaggagatcaagaccatcctggctaacatggtgaaaccctgtctctactaaaaatacaaaaaaaaaattagccaggcgtggtggtgggagcctgtagtcccagctactagggaggctgaggcaggagaatggcatgaacccgggaggtggagcttgcagtgagccaagatcacactactgcactccagcctgggcaacagagcgagactctgtctcaaaaataaatatacaaaaaaaaacttgtatacaagtgttcatagaagctgcatttttaatagccaaaaattgaaaacaccccaaatgttcatcaacaggtaaatggataaacaaactgtggtacatctgtacaatggaatactacttggcaatcaaaaggaatgtactattgatacatacagcaacatgaatcaatctcagaataattatgttggactcctccccccaaaaaggaacatactatatgattccgtttatataagactcaagaaaatacaaactaatctatagcaatagagaacaaatcagaggttgcttgaaaaatagggatgggagtgtaagtgggtgggagagattacaaaaaaatacaaggaaatgttgagattacagaaatgctcatttaaatatgagcagtggaagggcgtggtggctcacacctgtaatcccagcactttgggaggccaagtggggaggattgctggagtccaggagttttgagaccagcctgagcaacatggcaaaaccctgtctctaaaaaaaccaaacaaacaaaaaaactagcgaggcatggtgtacatgcctgtagtcccagctacttgggaggctgatgtgagagaatcaaaataaataaataaataaatatgagccatttgttttatgtcaattataccttgataaagttttttttagtgactttgggaatataacaaccaaacacagtctcagggcttttttgcattctgttttgaacaaagtaaccaaaaatgacttttctgagatcattggagaagtatgaatatggactgagtgttagatgaaattaaaggaatattatttttgctagctggaataatggcatgatggtactgctaaactttttatcattaagcaatgcatactgagatagttatggggcaaatatctgggattgtttaaaatgcttcggaaaacaggaatacataaaataagctgaggagaatgctgataattggtgaaactaggtgataggagtttattgcattcttctccctacttttgtagatatctgaatgtcactttcataataaagttagaaacaggctgggcgtggtggctcacacctctaatcccagcactttgggaggccaaggcaggaggatcgcctgagcccaggagttcaagaccagcctggccaacatagcgaaaccccatctctactaaaaatacaaaaatcagccaggcatggtggcatgtgcctgcagtcccagctacttgggaggctgagacacaagaattgcttgaacccaggaagcagatgttgcagtgagctgagattgcaccactgcactccagcctggatgacaaaagtgagactcttgtctcaaaaaaaaaaaaaaaaaaaaaagactcgaataaaataaaaagaatgactcctagatctctaattctagcaatcagggtatggtaataccacttaccaagatgcatgggagataaacaggttcagaggaaatcaagttctcattaagggccacattaaggttcataaagaacctttgggccaggcgtgttagctcatgcctgtaatcccagcactttgggaggccgaggtgggcagatcgcttgaggctaggagtttgagaccaacctgaccaacatgataaaaccccatctctactaaaaatacaaaaattagccaggcatggtggcaggtgcctgttatcccagttactcaagaagctgaggcaggaggatcacttgaacctgggaggcaaaggttgcagtgagccaagatcatgccactgcactccagcctgggcaacagaaaaaaaaagatcagcaaaaaaaaaaaaaaaaaaaaaaaaaaggctcacagggcggagtctgagggagatcccatgagctgccacctgtcctctttcagtggacttgtgtggagagggctttattccccagcaagaagccatgacaagcatggagcacttccaaccaggaaaactcacccaagctctggtgtccaaggtgttcactgggggtcagttacataggcagagagcacccaagtgacaactcctcagtctccagcccacagaggtcaaactaacacagtgttgcccaaagccccaggtatgcaaaaacagacaccatgagtcatggtgttagcataaactatccctctgtcccacccaaggcccagatgtgtacagatactgttatcaggcaggatattccaaaggcttagagcttaaggagtggtcaagggccagtttttttctttggaatgttcaatacttaaggacccatgccagcagagttaaggctttactgcacgtggccctacttctgccaatgaacttggagcttacgtagcatcttttttttttttctttttgagatggagtttcgctctttttgcccaggctggactgcaatggcacgatctcggctcaccgcaacctccgcctcctgggttcaagtgattctcctgcctcagcctcccgagtaactgggattacaggcatgtgccaccatgcctggctaattttgtattttttagtagagacagggtttctccacgttggccaggctggtctcgaactcccgacctcaggtgatctgcccgtcttggcctcccaaagtgctgggattacaggcgtgagccaccgtgactggccatagcatcttaataaagaacaataaatttgtttgggaggctgaggcaggagaatcgcttgaacccaggaggcggagtttacagtgaaccaagatcatgacactgcactccagcctgggtgacagagttggactccagatcaacaccaacaccaacaacaacaacaaaaaaaaaaaaaaaaaaaaaaaagaacaataaatttgtagagaatgacaagacacaggaaaagaacttttgagcttccgggcacagcaaattgtgggaagataaatatattgggcaactagtggaagataagggctggctcataaggtttgttatatagattcccctcctgccatctgtgggctgataagagtctagagattgtattggctattaagaaatcatcctgcccttcttggtagagaaggggagggcagagttctttcatgtgtctgctttttctcaactgtcttcagctcaaaataatgcttatgctggggtggcaaatttgaggtaacacactctcaaccccttcacccatcaatctaaggtgaccaggaactaacttgtagtctaacaaagccaggttcactgacccatttcaatgagggagaatgcacaccagaaccatggggcatctcaccaaacaaaggaaaagattggccaagcaaggtggctcatgcttgtaatcccagcactttgggagcccaagacaggaggatcacttgaggccaggagttcaagaccagcctgggcaacatagtgagaatccctctcttaaaaaaaaaaaaaaaaaaaaagttttttaattagccaagtgtggtggtgcaccttaattccagctactcaggaggctaaggcaggaggactgcttgagcccaggagttagaggctgcagtgagcctgtgattgtggtgatggagtgagaccctgtgaaagaggataagggggcagtggggaaggaaagggctgggaggggaggggaggggaggggaggagaggggagggagaggagaaagaaagaaagaaaagaaaagaaaggaaagaaggaaggaaggaaagaaagaaggaaggagagaggaagaaagaaagaaaaagagaaagaaaggaaggaagaaaaagaaagaaagagaaagaaagaaagaaagaaagaaagagaaacaaagaaaagaaaagaaagagaaaagagggaggagaggtaaggggaggggaggagaagaggtcagttcaagaccagcctggtcaacaaggtgaaaccccatctctactaaaaatacaaaaattagccagcatggtgctgctaatcccagctactcaggaggccgaagcaagagaatcacttgaacctaggaggcagaggttgcagtgagccgagatcacgccactgcaaaccaacctgggtgacagagtcagactccgtatcaaaaaaagaaatgaaataaattaattaattaagtgaaatgaaaataatttgtggatacaaggaaaaaatttaaaaattttagaaaaagaaaatgttacctacttctcagtggtatgtgaagatttagcaagacgtgtaggcaaagagctgaacacaagtccttataggacgcccttaacaaatattagctattgttgttatcgatatcagcattactttcacacagatatttttgatcaactgaaagcaccacccacctccacacacattaacccagagcaatgtattgtcagtgcttgagagaaagggctgactgggtgcggtggctcacgcctgtaatcccagcactttgggaggccgaggcaggcagatcacctgaggtcgggagttcaagaccagcctgaccaacatgtaaaaaccccaactctactaaaaacacaaaattagccaggtgtggtggcacactactgtaatcccagctactcgggaagctgaggcaggagactctttgaacccgggaggtggaggttgcagtgagctgagattgggccattgcactccagcctgggaaacaaaagcaaaacttcctctcaaaaaaaaaaaagagagagagaaagggctttgttgccacaacatgtaagttcagtcctagttcatttgcttccgagctgtgtgaacttaagcaattgtgtcattttcctgagcctcagtttccttatctgtaaagtgggaatcatatttctctcgggatttctgagaattaaatagaatcatattattattctctcttccactcaagccatttctgtctccctgctcccgcaattcctaaaccttcccacctcagctacagctcacagcgcctcctggaggcctggagggtctgatccttggagggggcgcaagaatgggagagtggataaggggcagggtgctgggctggagagggctggagagccctgggatgttacctgttctcactggaggagaccaaaggcacatttagcctgatggggggtgaggggttgcccctgtgcgagttatatctgcatgggtacttctgtgtgtgtttgtaggtaaagggcagttaaaagtctgggatgactggaaatctggaacctgaagtctttggagaatgaaaaagagtggttgtgcatgagtccctcagcagtataacaggggtaggttattctgaaatattagatataaatatagaatatgaatatattagcatagatgtacagataaatgatgtatacttatacaatagaaagatgatttagggctgggcctggtggctcacgcctgtaatcccagaactttgagaggccgaggcaggcagatcacctgaggtcaggagtttgagaccagcctggccaacatggagaaaccccgtctccacaaaaaatacaaaaattatcggctgggcgcagtggctcacacccgtaatcccagcactttgggaggcggaggcgggcacatcacgaggtcaggagatccagatcatcctggctaacacagtgaaaccccgtctctactaaaaatatttttaaaaaatagctgggcgtggtggcaggtgcctgtagtcccagctactcgggaggctgaggcaggagaatcgctttaacctgggaggtggagcttgtagtgagccgagatcgcaccactgcactccagcctgggtgacagagagagactccatctcaaaaaaaaacaaaaaacaaaacaaaaacaaaaattagcctggtgtggtggcacatgcctgtagtcccagctactcaggaggctgaggcaggagaatcacttgaacccaggaggcggaggctgcagtgagctgagatcaaacgactgcattccaccctgggtgacagagcgagactccatctgaaaaaaaaatgattatttagatagataatatagatataaagataaattatatagacataaatggtaaatagatgattcaaatatagatgatataaatatagtatagacgtgatatgaatatagaaatggatatagatgatacagacaggaaaaagcagacacataattatgttaatatctttaactactggccggcgtggtggctcacgcctgtaatcccagcactttgggaggccgaggtgggcggattatgaagtcaggagatcgaaaccatcctggctaccacggtgaaaccccatctctactaaaaatacaaaaaaaatttagccgggcatggtggtggacgcctgtagtcccagctactcaggaggctgaggcgcgagaatggcgtgaacccaggaggcggagcttgcagtgagccaagatcgcgccactgcactccagcctgggcgaaagagcaagactctgtctcaaaaaaaaaaaaaaaaaaaaaaaaaaattctttaactactgagatcttcggcttgggaaaaatggggtcctaatgtacagtttttatagagaaggcaagagacaactgggcatggtggctcatgcctgtaatctcagaactttgggaggctgagccgggcagattgcttgggcccaggagttcaagaccagcccgaccaacatggcaagactctgtctctacaaaaaatattaaaaattagccaggtatgatggtgagcacctgtagtcccagatactacagaggcggaggcatgagaatcacttgagcctgggaggttgaggctgcagtgagccatgattgcgccactgcactccagcctgggtggacagagtgagaccctgtcacaaaacgaaaagaaagaaagaaaaaaaaagcaagagacatgcctgattctttcctttacttactagttttcacaataatgagttggttccttagtgtccttcaaaagtggcctgtgaggttcggttcttttgagtatcaagatgttggcagagcactgtggctcacacctgtaatcccagcattttgggaggccaagacaggtggatcacttgaggtcaggagtttgagacaaccctggccaacatggtgaaaccctgtctctactaaaaatacaaaaattagtcaggcatggtggtggatgcctgtaatcccagctactcaggaggctgagccaggggaatcggttgaacctgggaggtggaggttgcagtgaaccaagatcatgccactgcactccagcctgggcgacagagtgagactccctctcaaaaaaaaaaaaaaaaaaaaaagatgctgattccctgacatgttggatcatggctatgtcagaatctagggataaaatactaacaagtgcttggaagagtaagtaaatgaaagacaagacagtgattgacttcaggataaacaagcccgtatgagaaaggaaatgccatcactgaatagttcactacacggcctaactgtggactcttatctattgcagagtcatcgtcatgcaagcattcaacattgatttaactagacatagtgataaatgtccaggcgtggtggctcacacctgtaatcccagcactttgggaggccgaggtgggtggatcacctgaggtcaggagtttgagaccagcctagccaacgtggcaaaaccctgtctctactaaaaatacaaaaattagccgggcatggtggcgtgtgcctgtaatcccagctactaggggggctgagcaggaggatcacttgaacctgggaggcagaggttgcagtaagctgagatcacgctactgtactccagcctgggcgacagagtgagactccaaaaaaacaaaggaaggaaagaagaaagaaaagagagagagacagagagaaagaaagaaagaaagaaagaaagaaagaaagaaagaaagaaagaaagaaagaaagaaagaaagaaagaaaggagggagggagggagggagggagggagggagggaagctaaacagagcaactgtgggagaggaagaaaatgagcactaaagggagttctccccaaaggtttcccaaagtctgcttcttggaggaattctatacaagactgaggtccctaaatctcctagatccaggcatagtaggctgaataacgccaccccaccccgcccgaagatgtccacaccctaatgctcagaacctgcgaacacattccccgacatggtaaatgaggttttgcggaagtgattaaggatcttgagatggaagggtcattctggattagctagtggacccaaggtaatcacaagcatccttctaacaggagagcagaaaggtcacagtcaggctgggcacggtgactcacgcctgtaatcccagcactttgtaaggcgaaggtgggcggatcacctgaggtcaggagttcgagaccagcctggccaacatggtaaaaccctgtctctactaaaaatacagaaattagccagtgtggtggcgtgtgcctgtagtcccagctactcaaatggctgaggcacaaggatcacttgaacctgggaggtggaggctgcagtgagccaagattgtgctattgcattccagcctgggtgacagagcaagactgcatctcaaaaaaaaaaaaaaagaaagaaaggtcagagtcagagaagatgtgaccactgaagcagagactggagtgatgcagtcagaagccacggcatggaggcagcctccagaggctgggagaaaaaagtgacagattctccactgaaacctccagaaggatccagccctgctgacacttgactttagcccgttaaggttagcttcagacttctgacctccagaactgtaagataataaatctgtgttgatttacaccactaagtttgtggaaatttgttaatggcagcaatagaaaaataataacaccatcggccgggtgcagcggttcacgcctgtaatcccaccactttgggaggccaaggtgggcagatcatttgaagccacgagttcgagaccagcctggccaacacggtgaaaccctgtctctactaaaaatacaaaaatcagcccagtgtgatggtgcatgcctgtagtcccggctactcgggaggctgagacaaaggatcccctgaacccaggaggtggaggttgcagtgagctgatcccaaagtgctgggattacaggcgtgagccaccgcgcccagacccctgttttttttcgtttgtttgtttgtttgtttgtttgtttgttttgaaacagagtcttgcttttgttgcccaggctggagtgcagtggtgcaatctcggctcactacaacctctgcctcccgggttcaagcgattctcctgccttttcatctcggccttccaaagcactgtgattacaggcatgagccactgtgcctggcctatttatttatttatttatttctaagatggagtttcgctcttgttgcccaggctggagtgcaatggtgccacctcggctcactgcaacttccacctcccgggttcaagcaattctcctgcctcagcctcccagtagctgggattacaggcaggtgccaccacgccaaactaattttgtatttttagtacagatggggtttcaccttgttgattaagctggtctcaaactcctggactaaagcggtccacccacctcagcctccccaagtgctgggattacaggcatgagccaccgctcccggccctggagtagcttttatgtggcaacaggagttagaaatccttctgtcctaaacagctcaggctcccacaacatactatatattgtctttctcttagtctttgcccaggctctccctgctccctctgtggttgcagttagggttcattcttggtccagggttaagattcgttccaaggcctggaacagcagtcagtctgtacctgtggtcaggacacaaactgataacttttactttcctggaatgtctactgatcctgtgacattgtccggcccctgctcattcaggtgctggaagagaatgcaaactattggagcctctggtttaggtttcctcaaggtcatctcagccatacccctgtctcctagagaaatttctcaagagattaagggactcattcaacttggcacataccttggttgccttaggtacttctttatcttcaaaataaattgtgccaaagtcctagatatcagaatgtcaacagggagaggttcccacccaggcctcccgtttccgcttgcaccttgcacctgttgggcagatgactttgcgcgagtcacttcctgactctggccctaaaacttcttttgtaaaacaaagggcatgggtcagagggtctctaatggggtcccaagattaaaatttcacagttctgagtgtctagagtctccaggcagtgtggtaccagctctggattcagagagacccaggtttgagcccaaagcctgggagttactgactggctggccgtgggaaagtgacggaacactcccaagcctcggtttcctcacgtgtaaaatgggaattaactaaggcaatgcctctcaaacacttggcacagcccctggcatggcatacagtccatgccattgctgttgagtttgtaatgattatatataattaagtctgtgctgacaatacgtagctacgtaggaccaagcatccagcagaacgcacagtccgagacactctaggttgtggtagtaactgctgtaaaataactcctttattattgcacgtcagaataggcaagagagtgtaacacagaaaacatcagctactcttcagggtggtgactgctccttagtctaggtatgtacacctggaagggtccgtgaacattttccatgggagagatggatacagagataagttaaaggaaattgccgggcgtggtggctcacatctgtaatcccagcactttgggaggtcgaggcgggtggatcatgaggtcaggagttcaagaccagcctgactgaattggtgaaaccttgtctctactaaaaaatacaaaaattagctgggcttgatggcgggagaatcatttgaacccaggtgacagaggttgcagtgagccaagatggcgccactgcacgccaagcctgggcgacagagtgagactccgtctcaaaataaataaataaataaataaataaataaataaataaataaaggaaattaatgcccaaatcctcacctttcaattgaacagttccccgaggagacctgcctgaaaatgccccagttgtataggaatgatttacccatatcctgtttcacttttcacccatcactcactttttctttttctttcctttttcctttttctttcctttctttttttttttttttttttttttttttgagacagagtcttgctctgtcgcccaggatggagcacagtggccccatctcagctcactgcaacctccgcctcccaggttcaagtgattttcccgcctcagcctcccaagtagctgggattacaggcgcacacaaccactcctggctaatatttgtatgtttagtagagatgggttttcaccatgttgcccaggctggtctcaaactcctgacctccagtgatctgcctgcctcagcctcccaaagtgctgggattacaggcgtgagccactgtgcccagactttctctttttctttttttttttttttttgccagaaagggtcttgctctgttgcccaggctggaatgcagtggctcaatcttggctcactgaagcctcaacttcccaagctcaagcaatcctcccacctcagcctcttgagtagctggaatcacaggtacgtgccaccacacctggctaatttttttttttttttgtaaagacagtgtctcactatgttgcccaggctggtcttgaactcctgggcccaagtgattctcctgcctcagcctcccaaaatgctggggttactggagtgagccaccatgcctggccccactttttactcacttttttgttcatttgtttgttcccacttaaaaaaaaaaatcctacctctcttccattttcagtacatgctctcagtgctgaaatcctctggtgaccaaatagagacatctagaacattaatagtggtgttaggaggaattcaattgactgggtaataaatccgccttcaagtctttgcttttcaatgttttgttttcaatactttgcagtcaacaaaactagaagaggacctagagcaattgccagctgaggagtcattcaactatattttgaagataggtgaccattgatttttggcatatagcttagaaggagttaaaagaattaagggacattgctatactgatattctttggattcccatctatttaattatgtgaacacattttctccaagcttgcatcaccaggggggtagacaatgaaagtttttctttttttcttttttttttttttgagacggagtctcgctctgtcgcccaggctggagtgcggtggcgcgatctcggctcactgcaagctccacctctcggggttcacgccattctcctgcctcagcctcccgagtagctgggactacaggcgccggccgccaccacgcccggctaattttttttgcatttttagagacgggtttcaccgtgttagccaggatggtctccatccgcccgcctcggcctcccaaggtgctgggattacaggcatgagccaccgcgaccggccgaaaatttttcaataaaaataaacttaaagaataccagcgcttccgccacggctgccattggagagcagcagccatggctctgcgcgaccctgtggccgtgggccccaaggtgaccaaggacgtgagcaagcccaggcacagctgccgccccggacgtctgaccaaacacaccaggtttgtgcgggacatgatccgggaggtgtgtagcttcgtctcgtacaagcggctcgccatggagttgctgaaggtccccaaggacaaacggtccctcaagttcatcaagaaaaggatggggacgcacatccgcaccaagaggaagcggaaggagctgagcaaggtgctggccaccatgaggaaagctgctgcctagaaagactgagccccctcccctgccctctccctgaaataaagaacagcttgacaggaagaaaaaagaaaaaaaaaccagcaacaattttatgtcaaaagtttgaagattagtgaacacattccttagaaaaataggccaggtgcggtggctcactcctgtaatccctgcactttgggaggccgaggtgggcggatcacctaaggtcaggagttcaagaccaacctggccaacacggcaaaaccccatctctactaaaaatacaaaaaattagccgggcgtgttggcaggcgcctgtaatcccagctacttggaaggctgagacaggagaatcgcttgaacccaggaggtagacattgcagtgagccgagattgcaccactgcactccagcctgggcaacagagcgagactccacctcaaaaaaaagaaagaaaaataaatacaacttgccaaaatggacacaaggagaaacaataaatatgaataatgctaaaatgattaaagaaatcaagtctaaaattaagtatcttccctccaatgtttatgataacccactagtgaaatttaccaaatatctaaggaagaaataatgccaatctcacataaactcttttatggtatagaaaaagcacagttttataaggcaggcagaaacttaattgccaaaacctgcctaagacaatataagaaacgaaaattacaggccagtctcactaccaaacttggatgtaaaaatcatacataaaatagcagccaggcacagtggctcatgcctgtaatcccagcacttgaggaggccaaggtgggtggatcacttggggtcaggagttcaagaccagcttagccaacatggtgaaaccccatctctactaaaaatacaaaaattatccaggcatgctggcaggtgcctgtaatgcaagctacctgggaggctagggcatgagaatcgcttgaacccaggaagcagaggttgcactgagccgaaatcacgccactgcactccagcctgggtgacagagcaagactccgaaaaaacaaaaactaaataagaggacttactctacctgatatcaaacttactagggagctatggtaattaggacagtgtagaattacccaaacatgaacagagaccaatggaagagattagtcagcccaaaataagaacccacttctggttgatgccaaggatggtattacagaaccatgaggaaagggtggtcttttccataatgagactgagacattgaatacctttacggggaaaaaggaaattcgaaacctacctgacatcacatcaaatattaattccagatggatcatatatctcaatgtgaaaagctaaacaataaaagctttaacagataatctagaagggtatctttatgcccccaagagagaaaaagtgttcttaaaaatgacacaaaaaagcacaaacattactgaaaagattgataaattggactacattcaaatgtagttcatcaaagacaccaggaagggctgggcgcagtggctcacgcctgtaatcccagaactttgagaggctaaggcggcagatccctgagatggggagtttggcagatccctgagatggggagtttgagaccagcctgaccaacatggagaaaccccatctctattaaaaatacaaaattggctgggtgtggtgtcacatgcctgtaatcccagctactcagaggctgaagcaggagaatccctttaacctgggagccagaggttgcggtgagccgagatcgcgccattgcactccagcctgggcaacaagagcgaaactccaattcaaaaaaaaaaaaaaaggcaccaggaaaagagtaaaacagggccgggcacggaggcccacgcctttaatcccagcactttgggaggccaaggcgggcggatcacttgtgtccaggagttccagaccagcctggtcaacatggtgaaaccccgtctctacaaaaaatacaaaaattagcccagtctggtggcatgcgcctgtagtcccagctacttgggaggctaaagtgagaggatcactggagcttgggaggttgaggttgcagggagctgagatcgtgccactgcactccagcctgggcaagagagtgagaccttgtctcaaaaaaaaaaaaaaagaaagaaagaaaattgtaggtgaaggtagaagtatctccagtgatcttcaagactggcacaatattctaaaaagatacatttgaacataaaaataaatgttaaccagacatcgtttttagaattatacaatacaaattctggtggggagttggctgagagcccctcctccagcttcctggtggtggcggtgttccacctcctgggtccccaccctcagtctcccttgctctgccttctcccccaccccacctccacatgctagaaaccaggtcctcttctcaccctctctcccaggtgagcctggtcactcacagagctgcagaatctgctgtctgtctgccaaggactcccaactctgtgtccacagcaaggatctgtgctaaaccacactggccttgctgggcctccagcgccatacactccctcttatggcttgtaacaggtgtttccccacctggaatgtttgctctcctctctcctccaaagtcctgcccctccctgaggtgagaaatcagttcccccacctcccccacagccccagcactctgtgctgaaatcatcatcaaaaaccctggtctcctccaatccctcctgctaccctctcagccacccaacatgctattccccctgcaggaacactcttccccatgatctttctcgagtcattcttcagatccatgtatcccctcctccaggaagccctccctgatactcaccactctccggccagggcaggcacttactctgggctcccacaggccccctggcctcccccatcccagccccgaccactctgggcagtcaaggtctggtgactaacctgcctcctcaactggactgtgggccccatgggggtagggctgtctctgtctctactgcctccccagcatcacccagtcaggcctggatgcaggcctggcatcaactctgcataaaggagcggaggtcaggagttccctggggcctcagtgcctggcactggtggaggggctttctgcatgccacactctggatcttctccagctactccttattctggaagctgcagcatgttgaaataaaaactggaactaaatggagatggaatggacttcacatttggacacatgggtgtgtaaagaggaacgtgacttctccaaagtaacgcatagaggccgggcgcagtggctcacgcatgtaatcccagcactttgggaggccgaggcaggcagatcatttgaggtcaggagttcgagaccagcctggccaacatggtgaaacgccatctccactataaatacacaaattagctgggcatagtggcacatgcctgtaatcccagctactccggaggctgaggctgaagaatcacttgaacccaggaagcagaggttgcattgaaccaaaatcgcaccactgcactccaacctgggtgacagagcgagactccgtctcaaaaaaaaaaaaaaaaaaaagtaacacactaacctcctgacccacccagagtgggtcttaccttctagaaagatagaaaagaatagaaccaggccaggctgactctggcagctttagaacaatagtaatggcaggagtggccggcgatggacagctgggggtgggactgaaatagacagcagccagggaatagtgggttgaagggagaaagggagttatttttctgtagtctttgaaattttatttttctctttccttttttggagacaaggtcctgctcttttgcccaggctggagggccatggcgcgatcatggctcactgcagcctcgaacttgagcgatcctccctcctcagcctcccaagtaggtggaacttcaggcgtctgccaccacacccagctaatttttaaattttttaaattttttctagagatgggggccttgctatgttgcccaggctggtctcgaactcctgagctccagcgatcctcccaccttggcctccgaaaggcctgagccaccgtacccggctgaaatttgtaatcaacccataatcatctattacttatgtaactgaattcctatgaaaagcataataaagtggagatcataaaggtgccgacttcgggctgttgtaagatttcggtgccacacctagcacagaaaaagcatggagagcagaagggcagtgaacgccagctggcacacgttggctacgtgcaagtattcgcctaaacgctgcgcaggtattcatcatatgatccccataaacctctgagggctgcactcacatgtcatccccgatctgctgatgagaagttcagttataggcccaaggtcacatatcccgagccagcgtaaaagtggaatccagggaggaggaggaggaggaggagcaggaggaggaggaggaggaggaggaggaggaggagaagaagaagaagaagaagaagaagaagaagaagaagaagaagagaaaggattactgtccgtctctctctggttctctgcacacccctcacctccagggttttcagtctgtctctggaccattctccttctctccccctgccccattctccaaaagcccaatggggtgacttgcaggctgggggcaccccctggtgcctgtgtgccgagtgcagaaagtcagggcggtacagggtggaggcaggtgagagtgtgggggtggtttgggtcccaccgagatatggaaaggtgggtatcagagtagagtgcactcattcatttcttcatcatcacagcccagagggtccactctgttctgggagtgttggggggtaggagtggagcaaaacaatgcccccagacgaagagagcagtgggagaaggagagaaggagcatcccagagccatagacacttaggggctgtgtgactctgggcaggtgacctagggtccttgaacctcagtttcctcatctgaagatggagatgatatgttagtatctccctcagagtattaatggatgctaggtacagttataagcttcatttacagatgaggaaaactgaggttggacaacttggccagtcacataaaagacgcagtggggtgctccctcagcaccactctccggctaagaattctggctgcagaggaggatggactccaggagaaagaacaggccgccattcccatggttcagcatggacatcggtggaatgctgttaaattggtctgttttgaggccgggagcggcggctcacgcctgtaatcccagcactttgggaggccgaggcaaatggatcacctgaggtcaggagttcgagacaagcttgaccaacatgacgaaaccccgtctctactaaaaatacaaaagttagctgggtgtggtggtgcgcacctgtaatcctagctactcaggaggctgaagcaggagaatcacttgaacccaggaggcggaggttgcagtgagccaagatcgcaccattgcactccagcctgggcgacagagcaagactctgtctcaaaaaacaaaaaaggaaggaaaagaaagaggcagtggtgttagcagggcaatgagttgaattccagtaactccggttcccctgggtttccaacccccagacctcaagcttgggcctccacactcctctccatcccatcccccaaacatgttcctgctaaactgttaagctccagttcctgcctatcccaccacttacccaccacccctcttctactccccctgtctccactaacctgccgatccacatattttcaacagccaagatcgctctcgacctgtgagcaggaagccagttgttgagacaggtacactttcatcccgtttaatgactgtgtcttcctcatctcatggcagtgtgaggcacgggcacacaggcctagggaaggcagacaagccctgtccctgcactcgccccactttgggctaggagaggaaaccagctcagacaaataatctcagatgcccgctgtttcaagatcctctggctgcagaggggagggtggaggggagcggaacctggaggcctggggctctgagaggagaatgggtggggcctagatgggaggggaaagagccagaatagaatgtgtggagggcagaagcgggcagatcaaagccaaatgctagaggcagaagaaaacagaaccccatgactcaggcgtttgaaatgaggaaattctcaacccagatagatgcagaactgattctaagaggaaaagattagaaacaacctagagatctgatcagatgggaaattaaatggatggagaggtgtgccaaagccttctctgaaacacctcccaggcattaaaattagtgatccagagccagctgtatggatatgaatgaatcttaaaagctgaaggacaaaagccagttgcagaagaagggatgtggactgtgtgctgtcctgggcataaagttgtttttttttttttttgagacagagtcttgctctctcacccaggctgaagtgcaatggtgcgaactcggctcactgcaacctccgcctcccaggttcaagcgattctctagcctcagcctcccaagtaggtgggattacagccgcctgccaccacgcccagctaatttttttatttttagtagagatggggtttcaccatattggacaggctggtctcgaacttctgaccccaagtgatccacccacttgggcctcccaatgtgctgagattacaggtgtgacccactgctcgcagagtgcataaagtttttaagcctgcaaaagaatgttttcccaggccaggcacggtggctgacacctgtaatcctagcactttgggaggccgaagcaggcagatcacttgaggtaatagagttcaagaccagcctggccaacatggtgaaaccctgtctctactaaaaatacaaaaattagccaggcttggtggtgggtgcctgtagtcctagctactcaggaggctgaagcaggagaatcgtttgaacctgggaggcagaggttgcagtgagccgagatcttgccactgcacttcagtctggacaacagagtggaactccatctcaaaaaaaaaaaaaaatccacttgttctctgggtgcagtggctaatgcttgtaatcccagcactttgggaggcctaggtgggcagatcacatggccaggtattcgagaccaacctgaccaatatggtgaaaccccatctctactaaaaatacaaaaattagccaggcgtggtgggcacctataatctcagctactcgggaggctgagacaagagaatcacttaaacctgggaggcggagattgcagtgagccgagatcatgcctttgcattccagcctgggcaacaaagcaagactccatctcaaaaaaataaaaataaaaataaagaacgttttcccaaataattgtgtgtggttgcacaaatatgcaggaaaacaatcagaacgtacctggaaatattaattataagatagtgcctcccgctgggctcagtggctcatgcctgtaatcccagcactttgggaggctgaggtgggcagatcacaaggtcaagagttcaagaccagcctggccagcatagtgaaaccccatctctactaaaaatacaaaaattagccaggcatggcggcatgtgcctgtaatcccagctactctggaggctgaggcaggagaattgcttgaacctgggaggcggaggttgcaatgagccaagatcacgccactgcactccagcctgggcgacagagcgagactccgtctaaaaaaaaaaagacagtgcttcccctgtaggagggagagaaggatgtgacgtttcagaagggatacagggaaccccaaacccggtcatgagtattttatttctctaaataaataatggtaaaaatgttaagatattgtaaagataggtgtgtatgtataatcgtggtaattcctctaatcctttctccatgtctgtatttgaaataattattttcaaggccaggcgcggtggcccacgcctgtaatcccagcactttgggaggctgaggcgggtggatcacttgaggccaggagtttgagaccagcctggccaacatggtgaaaccctgtctctactaaaaatacaaaaattagctgggcatggtggtgtgtgcctgtagtcccagctactgggaaggctgaggcaggagaatcacttgaaccccggaggcagaggttgcagtgagctgagatcatgccaccgcactccagcctgggcgacagaacaagactccatttcaagaaaaaggaataattatttttggctgggtgcagtagctcacgcctgtaatcccagcactttgggaggccgaagtgggcggaacacctgaggtcaggagtttgagaccaacctggccaacatggtgaaaccctgtccctactaaaaatataaaattgcttgaacctgggaggcagaggttgcagtgaactgagaccactccactgcactccagcctgggtgacagagcgagactctgtctcaaaaaacagtaattattattatttttaaaataacatatattttggaggctgggcacagtggctcacgcctgtaatcccaacattttgaggggccaaggagggaagatggcttgagccagaagttcaagacaaccctgggcaatatagtgagacctcatctctacaaaacatttaaaagttggccaagtatggtggcatgcacccgtagtcccagctatctacaaggctgagatgggagggtcacatgacccgggaaggtggagggtgtaatgaccccaccaaaacactgtactccagcctgggcaacggttcgaaatcctgtctcaaaaacgtatacttggttgagcacggtggctcacgcctgtaatcccagcactttgggaggccgaggcgggcggatcacgaggtcaggagatcaagaccatcctggctaacacggtgaaaccccgtctctattaaaaatacaaaaaaattagccaggtgtggtggcgggcgcctgtagtcccagctactcagaaggctgaggcaggagaatggcgtgaacccgggaggtggagcttgcagtgagccgagatcgcgccactgcactccagcctgggcgacagagcgagactccgtctcaaaaaatatatatatacttttgaaatacctttttttttttttaataaggggactggagggggtggaaccaggtgatagttggatacagagggagatgaaggaaaggaagcaaaagctgtcccccaggagacccgaaattttatttttctcaacttatggttgccttcctgatatgaatttgtaggagcagtgccttatttttttcttcttgcaccctcacccagctacgaagagtagtacttagaaaagaacttttaggcctggtgcagtggcttacgcctgtaatcccagcactttgggaggccaaggtgggtggatcacttgaggccaggagttcgagactagcctggccaacatggtgaaaccccaattctattaagaataaaaaaaatggggccggtctccagctcctaaccgcgagtgatccgccagccttggcctcccgaggtgccgggattgcagacggagtctggttcactcagcgctcaatggtgcccaggctggagtgcagtggcgtgatctcagctcgctacaacctccatctcccagccgcctgccttggcctcccaaagtgccgagattgcagcctctgcccggccaccaccccgtctgggaagtgaggagcgtctctgcctggccgcccatcgtctgggacgtgaggagcccctctgcctggctgcccagtctggaaagtgaggagcgtctctgaccggccgccatcccatctaggaagtgaggagcgcctcttcccggcagccatcccatctgggaagtgaggagcgtctctgcccggccgcccatcgtctgagatgtggggagcgcctctgccccgccgccccgtctgggaggtgaggagcgtctctgcccggccgccccgtctgagaagtgaggagaccctccgcccagcatccgccccatctgagaagtgaggagcccctccgcccggcagccgccccgtctgagaagtgaggagtccctctgcccggcagccacccagtctgggaagtgaggagcgtctccgcccggcagccgccccggccgggagggaggtgggggggtcagccccccgcccggccagccgccccgtccgggagggaggtgggggggtcagccccccgtccgggagggaggtgggggcggtcagccccccgcccggccagccgccccatccgggagggaggtgggggggtcagccccccgcccggccagccgccccgtccgggagggaggtggggggtcagcccccctcccggccagccgccccgtccgggaggtgaggggcgcctctgcccagccgcccctactgggaagtgaggagcccctctgcctggccagccaccccgtccaggagggaggtgggggagtcagccccccacccggccagccgccccgtccgggagggaggtgggggggtcagccccctgcccggccagccgccctgtccaggagggaggtgggggggtcagccccccgcccggccagccgccccgtctgggagggaggtggggtcagccccccgcccggccagccgccccgtccgggaggtgaggggcacctctgcccagccgcccctactgggaagtgaggagcccctctgcctggccagccaccccgtccaggagggaggtgggggagtcagccccccacccggccagccgccccgtccgggagggaggtggggggctcagccccccgcccggccagccgacccgtccgggagggaggtggggggatcagcaccccgcccggccagccgccccgtccgggagggaggtgggggggacagcccccgcccggccagccagcccgtccgggagggaggtgggggggtcagccccccgcccggccagccgccccgtccgggagggaggtgggggggtcagccccccgcccggccagacgccccgtccgggaggtgaggggcgcctctgcccggccgcccctactaggaagtgaggagcccctctcccagccaccacctcgtctgggaggtgtacccaacagctcattgagaacgggccgggatgacaatggcggttttgtggaatagaaaggggggaaaggtggggaaaagattgagaaatcggatggttgccgggtctgtgtagaaagaagtagacatgggagacttttcattttgttctgtactaagataaattcttctgccttgggatcctgttgatcggtgaccttacccccaaccctgtgctctctgaaacatgtgctgtgtccactcagggttaaatggattaagggcggtgcaagatgtgctttgttaaacagatgcttgaaggcagcatgctcgttaagagtcatcaccactccttaatctcaagtacccagggacacaaacactgcggaaggccgcagggtcctctgcctaggaaaaccagagacctttgttcacttgtttatctgccaaccttccctccactattgtcctatgaccctgccaaatccccctctgcgagaaacacccaagaatgatcaataaaaaaaaattaaaaaaaaaaaaaaaaaaaaaaagaataaaaaaaattagttgggcatggtggcaggcgtctgtaatcgcagctactcaggaagctgaggcaggagaattgcttgaacttgggaggcagaggttgcagtgagctgagatcgtgccactgcactccagcctgggcaacagagggagactccgttaaaaaaaaaaaaacaaaaacgaagaagtcaaggcaaaagtagagagtttatttatttgagccaagcttgagggttgcaaatcagaagtatagattcaaattgccctgaatatgcactctgatttagcagtacttgcaagttggatttattttattttattttattttattttttggtctgagacagggtctcaccgtgtcacccaggctggagggtagcaacaagatcatagctcaccacagtcttgaactcctgggattaaatgatcctcttgcctcagcctaccagtggattttttttcttttttgagacggagtctcactctcttgcctgggctggagtgcaatggcgcgatctcagctgatgcacctctgcctcccagtttcaagcaatcctcctgcctcagcctcccaagtagctgggattgcagacgtgcaccaccatccctggctagtttttgaatttttattttaatctttttttttttttttagtttttcttagtttttgtatttttagtagaggcgtggtttctccatgtctgccaggctggtctcgaacttctgacctcaggtgatctgcccaccatggcctcccacagtgctgggattacaggcatgagccactgtgcccagcgaacaagtggatttttaaaggtaaaaaaagggggacagggagtgggactgacacaagtggatcgcttgagcccaagagtttaagaccagactgggcaacatggcgaaacctcatctctacaaaaaaaagtacaaaaattaggcaggcatggtggtgcatgcctgtgattccacctactcaggaggctgaggtgggagaatcacctgggcctgggaggtcgaggctgcagtgagccatgaacctgccactgcactccagtctgggctatggggtgagaccctgtctcaaaaaaactcaataaccacccccgctaaaaaaaaaaaaaaaaaaaaatgcttgtcaggaattcttattggtttacaaaaataacataactctcaggagtttgagaccagcctggccaataaggtgcgcgccaccacgcccagctaatttttgtatgtttagtggagatgggttttctccatgttggccaggcaggtctcaaactcctgacctcaggtgatctgcccgccccggcctcccaaagtgctgggattacaggcatgagccactgcacccaccccttgacttctttcttttaggtccacagtacatagaacatgtcaggaaaagaaaggatggggtgaggtgatggggtgaggatgtaggataatgggacaggatgagcagtgggatgaggggatggaatgaaggactggataagggataggtgggggtaaatgagagcatgggggaggcagtgctctcctgatggtggggtgcacgagtggatggatgacaggataaatagggaagggaggagggataggatgacgagacggctgtagaagcccagagcagagaacattgctgctttggggtcgatgatgtaatcacctcaactcactgacactattcccagccacggatgatgctcacagaatctggggaagtccaaggcctggaagcaggactcatcttggacttccccttctatctagttccaggtgctgaatgaggcacctctgaagaagagaaaggagagagactaagataaacaagactgagaggaaaaaatcagagtgggcaggcagagtgagcctggtaaagtggaccacagagcagacaggctgtggcttagccttggacagcaggtggggttccagagccatatgcttggaggagccttagcaaactaaatcccccagcagtttcttaaacccatccatcacacagcttgccagaaccctggggttggcagcttccagaatggttaggaaaatccacagtagtggtcaggcgcggtggctcatgcctgtaatcccagcacttagggaagccaaggcaggcggatcactaggtcaggagatcgaaaccatactggttaacacggtgaaaccccgtctctactaaaaatacaaaaaattagctgggcatggtggcatgcgcctgtaatcccagctactcgggaggctggggcaggagaatcacttgaacccgggaggcagatattgcagtgagccgagatcgcgccattgcactccacctgggcaacagagcgagactccgtctcaaaaaaaaaaaaagaaagaaagaaaaagaaaatccacagtagggggccagacacaaaaatgatcactccagcactgtccagcccagatcagagggtttctgatgggaagtagctggggtcagggcaaggagtggtggaaaaagtcaggctgttttcagctgaactatacaaatgggcatctcctggcccagggtggggatttggcattgcagaaaggccagaatccacctggaatcactcagttactgtgaaatctatcttgggaacctaagaatgtttgctttctagacttgagaattttggacacttgattgctttctggatgaattttagagatttataaattgtattgaaagtgtttattcgacaagatgtttattgagcatccacagtgtgttaggcactggggatacagcaacacacaaaacagacagagaatcggcccttatggagagaccatttcagtgggaaaagggagtataaaaaagcaaatcaaggtcgggagcagtggctcccaccagtaatcccagaactttgggaggccgaggcaggtggatcgcttgagccctgggcaacatagctaaaccctgtctctacaaaaaattagccaggcatggagcgcgtacctgtagtcccagctactcaggaggtcgaggcaggaggatcgctgacatctgtgaggcagaggcttcagtgagcagagatcacactactgcactccagcttaggcaacagagcaaaactctgtctttaaaaaaaaaaaaaagtaggccgggcagggccgggcccagtggctcatgcctgtaataccagaactttgggaggccaaggtgggtggatcacttgagtgaggtcagaagttcaagaccagcctggccaacatggtgaaaccctgtctctactaaaaatacaaaaattagctaggcatggtgtcacatgcctgtagtcccagctactcaggaagctgaggcaggagtatcacttgaatccaggaggcagaggttgcagtgaacggagatcacaccactgcactccagcctgggcaacaagtgtgagactccatctcaaaaaagaaagtgaatcaatatataaaatataaaaagacaaaaaataatacacgttggcaatgatgtggaggaaaggaaacataccctgttggtgagaatgtaaattagtccagccactatgagaaacagtatggaaatttctcaaaaaactatcataagggctgggtgcggtggctcacgcctgtaatcccagcactttgggaggccgaggtgggtggatcacaaggtcaggagatccagaccatcctggctaacacggtgaaaccccgtctctactaaaaatacaaaaaaaaaaaaaaattagctggccatggcggcgggcacctgtagtcccagctactcagaaggctgaggcaggagaatggcgtgaacccaggaggcgaagcttgcagtgagccgagatggcaccactgcactccagcatgggcgacagagcaagactccatctcaaaaaacaaacaaaaaacaatcatatgatccagcaatcccactactgggaatttatggaaaggaaaagaaatcagtgtatcaaagggatagctacacagcaatgtttattacagcactattcacaatagcaaagatatggaatcaacctaaatgtccatcaacagatgaatggataaagaatatgtggtacatctacacaatggaaaactatttggccgttagaaaaagaataaaatcctgtcatttgcagcaacatgtgaaactgtctgtccctacagggttgacaagaactgcaagccaggttctagatagaaatataattaagcattggctgggcacagtggctcacacctgtaatcccagcactttgcgaggccgaggtgggcagatcacttgagggcaggtgttcgagaccagcctggccaacatggtgaaaccctgtctctactaaaaatacaaaaagtagctgggtgtgatggcaggtgcctgtaatctcagctacttgggaggcctaggcagaattgcttgaacccgggaggcagaggttgcagtgagccgagatcatgccattgcactcccagcttgggtgacagagtgagactcaaaaaaaaaaaaaaaaaagaaaaagaaagaaagaaagaaaattaagcattaatcatgctgcactttggtccacttccttgttgctgaaagccacatagctctagatgctgaccatttgtatccccattgttcttatagacagcatcgctgaccttagaatcatgatgtttttgttaaggatcacgtcagatgttttttggacccccaattccagccaccagtttgaagacccctacagaggatggggattgtcaggcctctgagcccaagctaagccatcacatcccctgtgacctgcacgtatacatctagatggcctgaagtaactgaagaatcacaaaagaagtgaaaatggcctgttcctgccttaactgatgacattaccttgtgaaattccttctcctggctcatcctggctcaaaagctccccggctgaacaccttgtgacccccacccctgccagccagagaacaaccccctttgactgtaattttccactacctacccaaatcctataaaacggccccacccctatctcccttcactgactctttttggactcagcccgcctgcacccaggtgaaataaacagccttgttgctcacacaaagcctgtttggtggtctcttcacacggacgcgagtgaaagggatcagcatgagactataacttcttcttccaccctctgtcccgtgacttcactctgcactcttcaaccaatcaacgatctccacccttcagcccactccaaaacccttgaacaccctagccccaaactcttaggggagatggatgtgaggtttccccccatctcctcattcagtgaccctacaattaaacctgcttctctgctgcaaaccagttataactgtagtaggctcattgcccagtgcacacagcaaatcaacaggagacactgggttgcaggagagaagaggtttcatcgtagggtcgccaaaagagatgaggagttgaagaatgtagggtgaagtcacgggacagggagatgaagaagccacattctcatgctgatcccattccccagtgggtagccttcacactggttgctggaattcaaggtctgaaaagcatctttttacatttttgtttatgtatttattattattattattattattattattattattattattattgagatggagtctcactctgtctcccaggttggagtatagtggtacaatctcggctcactgcaacctctgcctcctgggttcaagcaattctcctgtctcagcctcctgagtagctgggattacaggtgtgaaccacctccccccaccacctccactccgctaatgtcctttgtatttttagtagagatagggtttcaccatgttgactgggttgatcttgaagtcctgacctcaagtgacctacccacctcagcctcccaaagtgttgggattatgggtgtgagccaccgtgcctggccctgaaaagcatcttaagtgattctttctttaacaaaagccttatgactctaatatcagagattctgtctataggaacaatgggggtgcacatggtcagtatctagctctacctgagttttagcaacaaggaaatggaccaaagtgcagcccgaataacacttaattataagtatgtttctgtccagaacccagcatgcaattcttgtcagccctgtgggaatggtttcacagtgtctcgatatactgacttgctgtgtgcattgggcaacaaacctattacaattacacatggatgtaactggaggtcattacattaattgaaataagccaggcacagaaagataaacaatgcatgttcttactcccaagtggaagctaaaaaagttgatcacatggaggtagagaatggaatgatggatactagagactgggaaaggcgtatgggtggggtggggtggggagagaggttggttaatacacctagacagaaggaataagttccctttttttttgagacggagtctcactctgttgcccaggctggaaggcagtggcacaatctcagctcactgcaacctctgcctcttgggttcaagcaatcctcctgcctcagcctccagagtagctgcgattacaggcacgtgccaccataaccggctaatttttttttttttttcagacggagtctcactctgtcacccaggctggagtgcagtggcacaatctcagctcactgcaagctccacctcccaggttcacgccattctcctgcctcagcctgccgagtagctgggactatagacgcctgacaccacgcccggctaattttttgtatttttagtagagatggggtttcaccgcgttagccaggatggtcttgatctcctgacctcgtgatctgcccgtctcggcctcccaaagtgctgggattacaggcgtgagccaccacgcccggcaagaacttttaagttttcttatctataggatgttgcaatcatcatctttaaacattagacatggaatctttataataatcttgccatatatatatatatatatatattttttttttttttttttttttttttttgacactgagtctcactttatcgcccaggctggagtacagtggcacaatcttggctcactacaacctccacctcctgggttcaagtgattctcctgcctcagccaccccagtggctggggactacaggcgtgcaccaccacatccagttaattttttttttttttttgagacggagtctcgttctgtcgcccaggctagagttcagtggggagatctcagctcactgaaacctccgccttgtgggttcaagcaagcaattctctgccacagcctcccgactagctgggattagaagtgcccaccaccacgtctggctaatttttgtatttttagtagagacggggtttcatcatcttggccagactggtcttgaactcctgaccccgtgatccacccacctcggtctcccaaagtactgggattacaggcgtgagccactgcgcctggccggttaatttttatattttcagtagagacaggatttcaccacgctggctaggctggtctcaaactcctgacctcaggtgatccacccgccttggccactgtgcctggtcaacagtctttctatttttattctaggctggagacctttgtctcaaaaacaaaacgagaatgctccctggagtctgtactgatccctcttccctcccaccgtagattagttttctccttgcatttaaaaagacctttctggctggcatccagtgaatgaattgtggaggagggggagaaggagagaggaagcaggtagctcagtggggaagctactgcaaaatcctggcaagcaatgacagtaccttgaatcagggctggtgtcagttggatcagggtggtagggaaaggaggaaatggataaatttggaatgtatttggaggtagagccagcaggatttgctgacaaactgggtttaaagtcaaagagagaaatcaaggttaaacctgacaaataaaaacagatgtggtctcaggcgagtagagacattatgcagaaagactattgcatcagggggaaagatggctgtaaaaacaatgaacaagaccagaatctgataacccagaaggatgtgttgtctaatgaaactaattttttcccctcctcctattttttttttgagacggagtttcactcttgttgcccaagctggagtgcaatggcgcgatctcggctcactgcaacctccgcctcccggattcaagcgattctcctgcctcagcctccctgagtagctgggattacaggcatgcaccaccacacctggctaattttgtatttttagtagagacggggtttcaccatgttggccaggctggtctcaaactcctgacctcaggtgatctgcccacctcagcctcccaaagtactgggattgcaggcatgagacaccgcgcccggcctctcctatattttgttgtcatcagcaagtgaaaagatggtgataccttttacagaggtaaggaaggaggtgagagaaagtattcccagatggggtgggaagctggtacagcccactttgcaggaggtgggggaatcgggaattcttttatatccatgaagtttgagatgtctgttagctctcccaggggtagaacagagggagcagataggctcaaggttggatttggaacgtcctagaaaccttccagaacaaggcaaaggaggaactgagaactggcatttacttcatagcaagagcgtatgagcctccccacccctcctcctttggcttcagggcacccctggaatgttagaggctagaatcaatgctaaagaagaccacagtcaaggattccccagactccagggagcactctggctatgctcttgagagaaagggctctggactagaatacaaattgcaagattgcaggccgggggcagtggctcatgcctgtaatcccagcactgtgggaggccgaggtgggtaaattgcctgaggtcaggaggtcgagaccagcctggccaacatggtgaaaccccaactctactaaaaatacaaaagttagctgggagtggtggtgggcgcttgtaatcccagctactcaggaggctgaggcaggagaatcacatgaacccaggaggcagagattgcagtgagccaagatcgtgccactgcactccagcctgggcaacagagcgagaccctgtctcaaaaaaagattgtgaaaattctaagaatctaatttttttttttttttttttttttttgagacggagtctcgctctgtcgcccaggctggagtgcagtggcgggatctcggctcactgcaagctccgcctcccgggttcacgccattctcctgcctcagcctcccaagtagctgggactacaggcgcccgccactacgcccggctaattttttgtatttttagtagagacggggtttcaccattttagccaggatggtctcgatctcctgacctcgtgatccgcccgcctcagcctcccaaagaatctaatattttaaaactccagcatatgcaactcaaagctcatctaattatacacttaagagttatgtatttcattgtatataagataccttgaggaacaaaaagtatctgtaaacaaatactgagctctagctactgatatgcatgctgatgtatttgggagtgaagtgtactggtatctgcaactgactttgaaatgcttaaaaaaaaatcaatggataggcaaaatgaacagatatgtaatgaaaaaagggccaggcacagtggctcatgcctgtaatcccagcactttgggaggctgaggtgagaagatcacctgaggtcaggagtttgagaccagcctggtcaacatggcaaaaaccccgtctctactaaaaatacaaaaaatagccaggcatggtggtgcacgcctgtaatcgcagctacttgagaggctgaagcaggagaattgcttgaacccgggaggcagaggttgcaatgagccaagactgtatgctattgcactccactctgggcaacagagtgagactctatctcaaacaaaaaaagaatagataggtaacaaagaaaggataataaaatggtggaatctgatgggtatacaggtgttcactgtatgtttgaaattttaatatttttataataaaatacgaaatcaaaatgcaaagcaaacaaagtaactgccctgctgaaaacccctccagacagcttccgtttgcaatagaaataaaatgcagtcttttccaagaccttgcaagatggcccctgcagacttcatgaatcttatctcctacattcaatctttgaaaatataacaaatatttattgagtgcctactgtgtgtcaggcactgcactatatgttggggatacagcagtgaaccaaacctacaataattcatgcacaaatggttctaacattcttccttctcaagaagcccattcccctggcaggccttctcacttcctgaaattgttttcatctcatcttcatctgcatgtggatatgagctcaggaaggccagagcccttctctccatcgctcatagctgcaccctcgggtctagaacaaggtcttgtttatagtaagacctcaataacagttagttgcagaaatattagctaacatctatttagtgcttgttacatgtgcacctgcgtctgctttaaatggtgtgcacagatgtactatttaatcctgaaaactagccccattttacaaggctaacagaggcacagaggaattaggctgtgaattcaagcagtctggcttcagccatcacggtcctaaccgctctgcaaactgcctctaaacgaatgaatgaatgactcaatcattctaactggcccaagtcaaaatattaactctgccactcagccaagttgacctggggccaaccgatttatctccctggacttcagattgtttatccttaaaggtcaagtccttcctctcagttcgtgaagatgtaagatgctggagaaaattgactcaaagacaccccatacacgcacgcacacaggaacccacatccgaacaatgagcgaggtaggagctggggagagtggcgcggggtcaccgccagatgcggggtgtggcaacctccaggcggccaaagtctctgacttccaggttcttctgtttgcttactccctatccgggggcccaaggcgctgtctccgccgcccaagccccgcgtaaacctgggtgacctcggagacatccgttggagcatgagttcccgacatcaggcggcggcggtggtccgggagaaacccggcggcggggagataagcctgcccaggaggcagggggctgggctagctgccccgccccgcgcctgacttcgttggggagggagacgcccggctcccgcccctaactagcccagccgcgcggagcgcctgggagaggagaaggagccgacctgccgagatggaggcgaccggcacctgggcgctgctgctggcgctggcgctgctcctgctgctgacgctggcgctgtccgggaccagggcccgaggccacctgccccccgggcccacgccgctaccactgctgggaaacctcctgcagctacggcccggggcgctgtattcagggctcatgcgggtaaggggctctggggacgtcctggctaggggtgggaggattcctgggagagaaacccgagtgccagggtgaggggcttttcgggtatcctagggaggaggcaggggcaggggtcccaaggcaaaggggctgctgctgtcctggggttgggggcaggagcaggttgtccagggctgagaaggggagaggtgcccgggagagaggatcgtggggtgggggaccagggctaggaggggcagagacctctgcctacagaatcctgggaaggtgatgggcagggaccgaggctgaaagagacaggagtcctccagccgaggagaagctgatgcagctgggcttgtcccagagggagaggtagctggagccatacaggtggggcatgctgaagagggcacaaagaagaaaagggggaggcgtccctgcggggagttggaggcagagaagaggctggagggttgcaggctcagagagggggtcccgctgaaggaatctgccagcagagaatgcaggatgggaggatgggtggagctcagttgggagttcctgggactggggaggaaggagagcaagaaagaaggcagaggcagccccagccttaggggatagcaggtgggagtgggcagaggcctgaagtttcccattcaaaaggattctgggtgacttcaaggacgtagaaaaaagggtggggtcttgggggagagatggggcggatactcagcagtgtctgctccagaatttcagggttttgtggtgactgaaaggggtggctggatatttggggggcagggagggccctaaggaattaagggagacccaaactgcttctggattgcccagcgtcagaggttagggttcagcaggaagcaagggaacgacaggaagttgggggatgccactgaaggatgtactgggggaggaggcccgggagcctagtgcaaaaagagaactgagcctcagctatttctgctgggatgggggcaggttcctggtagagggcgtagaagctagacccggtggctcctcaagtgacaggggccatgatggagacaccttggatcgaagaggtcacagcaccctcctctttcttcctccctacccccagctgagtaagaagtacggaccggtgttcaccatctacctgggaccctggcggcctgtggtggtcctggttgggcaggaggctgtgcgggaggccctgggaggtcaggctgaggagttcagcggccggggaaccgtagcgatgctggaagggacttttgatggccatggtaagtcaagggctgctaggccctccgctcacagcctgccaccacttactggtgtgtgacctttgcacatggcttagtccctctgttgcctcatctgtcaaatggagtgataacagtgcccatcagccgggtgcagtggctagtgcctgaaatcccaacactttgggaggcggaggtgggtggatcacttgaggtcaggagttcgagaccagcctggccaacatggtgaaaccctgtctctactaaaaatataaaaattagctgggcatggtggtgcgtacctgtaatcccagatacttgggaggttgaggcaggagaatcgcttgaacccgggaggcagatgttgcagtgaaccaagactgtgccactgcactccagtctgggcaacagagtgagcctccatctcaaacaaacaaacaaaaagcagtgcccatcatgtaggattgagtgattgagtgaggactgagccttgtgcaaagtgagcactcactaatcaccaggttgtagtatcagtgataaccatcaatgatccaggtaaagccctgagggttcagaaagatgccggagcgctttcaaggtgctggggattggtgggcaagccctcgaataatagaaacagttctctgtattacaacagaaagcaggaggcccatgctgggtgctgccaggaactcagtagtaactaagacagcaccggtgctgcttccccagcgcacctaggccagtggggaaacagactcaccacacagtcccagcccagagtggtcagggccaagatggggaagcacggggagaaaggtcagggtgggatggggaggggtcagggcaagaggggtcagggccaggctgagggaagccctgggactgtaggaatttagaggaggtacctgacccggcatgtttggtgagggagcttcaggaagtcttcctggaagagaggctgtcggagctgagactcataagatgagtggggagggtgttccaggcagaaagaccagcacctacaaaagcatgactttgagagaagcattcatccattcaactgatgaattttcagactgggcacgctggctcatgcctgtaatcccagcactttggaaggctgaatggggaggatgacttgagcctaggcatttgtgacaagcctgggcaacatggtgagaccctgcctccacaaaacaaacaaacaaacaaaaaatcattatacctggtaccatgggtaccaggtacatagaaatgactcaggcagatatggtgtcctctcctactgtgggagaggcgggcttatactgcagtaagacaatagagggagggaatataatcctaaaatgagaggtacagatttgagagcaaacacagggcacaggcatatgtacgagggtaaagagggaatcagggaaggcttctcagagaaggtgacatttaagccgggacatgaaggatgaacgagttagttcaccaaggatgggatggaaaggggtgagagtgatggaggcagagggaactgcaggatcataggcctagacaggggatcctgacgcccttgaggaagtgagagaagaccagcgcagtcgtagtgggttaagtaacaaagctgagaagccagggaaatccctggtcatgcagggcctgtgagtcacgtcagagtgtttgggcttttgtttttcctgggagcagtcgattttaagcagggaacagctgtattcagagttgggaagatcctgtggttgctgcctgaaggggatgaaactggaggctaggagcccagggtgatagggaggatccagggtgatggggaggctgggaggtccgcggtgatggaccagggctggggccaggggatggggaggaaggagtaattgggagaggcctggggctctggccgaggaatggatggtgggctgaaacagggagaggagagatgcttaggccactttggaacacagtagggcaaggacaggagacacccaaggggaagtgcccaagagaccacgacaggctggcattggacagggaaggtctgtctggagcaggtgtcttggataagggaggaaaatggtgcagttccatcctcctccctctctgttcaacctctaaactacatggggcacaggacccagtgggactccataaatgatgggatgggtggatggaaggaaggaaggaggaaacaactcttcattcatcctggttatttacagaacaggccaggtgcggtgctcacgcttgccattctagcactttgggaggctgaggtgggtggattacctcaggtcaggagttcaagaccagcctagacaacgtagagaaaccccatctctactgaagatataaaattagctgggcgtagtggcatatgcctgtaatcccagctagtcgggaagctgaggcaggagaatcgcttgaacccgagaggcagaggttgcggtgagctgagatcgtgccattgcactccagcctgggtgacaaagcaagacctcgtctcaataataataataattacaaaacagaaggagcctgggtcatcccagctacctacttttcaggagaatgtactcccttacccaagggcaaaggatgggagaaccagtttgattatgcatttattgagcacctactgagtcctcatccctgggctaggctggaatggactcagatggagcctgaagagtccccctcagggaacctcactagaaagaaggaggaatcggccgggcgcggtggctcacgcctgtaatcccaacactttgggaggctgaggtgggtggatcacaaggtcaggagatcgagaccatcctggctaacacagtgaaaccccatctctactaaaaatacaaaaaatgagccaggcatggtggcgggcgcctgtagtcccagctactcaggaggctgaggcaggagaattgcttgaacccgggaggcagaggttgcagtgagacgagatcacgccactgcactccagcctgggcaacagagcgagattccgtctcaaaaaaaaaaagaaagaaaggaagaagggggaatgggggagaggggccggtccctttttgagtctagccttctgcgcaggggttttcttctccaacggggagcggtggaggcagctgaggaagtttaccatgcttgctctgcgggacctgggcatggggaagcgagaaggcgaggagctgatccaggcggaggcccggtgtctggtggagacattccaggggacagaaggtcagcatggcggggtcaccccagggtctccagccgagtgaaagggaaaactctcctactgtggctgggggtggccccaacccaggtcctggaatgggcaggaggggaagccttgaactctagggctggcctgggggttctgttcactgccaccttctgtctctgtcccactgtctctccgaggctgtcatgacatctctctgtgtgtctctggtgctatcatcccattcttcctgggtctccatctctctctctgtctcttttctttctctctcctttcctctattttttgggccctcagtctatctctgtttctgtctccctgtctgtgtgatggtcactctgtttctttctccctgtctgtttctctgtccctatctgtctgtatccttctttgcctgtttagctctctccctgcgctgtccatccatctttccctgcctccctgtctctctctggttgggttcagctccaacctgctcccctctgcctggctccatcacagcctacctccctgcccccattccccccaggacgcccattcgatccctccctgctgctggcccaggccacctccaacgtagtctgctccctcctctttggcctccgcttctcctatgaggataaggagttccaggccgtggtccgggcagctggtggtaccctgctgggagtcagctcccaggggggtcaggtgagtgggtgggacccctctccaactaccttccctgaaggttcctgccaaggtcccatgagaactagctgcccttctccccacagacctacgagatgttctcctggttcctgcggcccctgccaggcccccacaagcagctcctccaccacgtcagcaccttggctgccttcacagtccggcaggtgcagcagcaccaggggaacctggatgcttcgggccccgcacgtgaccttgtcgatgccttcctgctgaagatggcacaggtgtgggaagggtgcagggaccccctctctgaatgggcgtggtgacctggcaggtccccagccaggtgtccctggggacctcaattgggttcctctctctttctctctctgcatgtctctgtgagtatgagtgtctctgtgcatgtgtgtgcatcccttctctgcacatctgtctgtccctttcagggcgttgctctcactgcctctcccgcccccgacctgggcatttgtgccgggctgtctgtctctccagcatctctcctctttctccctcccacctcggcccttgtgttcaggccccatgcccagggtcctacaccagcaatccccaggatcacttcatcccatcccctgcagcctccccagacttttatgtaaattcacaattttatgtgaattatggtcatttattaggaagccttgcaatatcaagttatgttaataaagtccactttattaattatataagaacaatatttcttttccttttttttttcttttctttttaaagagacaggatctctttctgttgcccaggctagagtacagttgcaaaatcatagctcactgcaaccttgaactcctgggctcaagcaatcctcctgcctcgggctcctgagtagctgggacaacaggtgtgcaccaccacacctggctaaattttttttttttctttgtagagatagactctcactatgttacccaggctggtcttgaattcctgggctcatgtaatcctcctgctgccttgaactcccaaagtgctgggactataggcataagacatcatgcccggtcgggcacagtggctcatgcctgtaatctcaggactttgggaggccgagacgggcggatcacctgaggtcgggagttcgagaccagcctgaccaacatggagaaaccccatctctactaaaaaaaaaaatacaaaattagccggacgtggtggcacatgcctgtaatcccagctactagggaggctgaggcaggagaatcgcttgaacccgggaggcttaggttgcggtgagctgagattgcaccattgcactccagcctgggcaacaagagcgaaattccatctcaaaaaaaaaaaaaaagaaaaaaagaaaaaagacaccatgccctataagtaaactagaattaaggtgactcctaaggaaataaatagtttttaactgtacgaacttttggaagaatggggccaattctttaattaaatgcagcctccctgtttgtggagaaagaaaaatttttcttaaccctattgccccatttcttttctcttttattgaatattttttagttttaactatagtaaaatacacataacgtttaccatcttaaccatttttaggtatacagtacagtagtgttcagtacattcatactgttatgcaatcagtctccagaactcttcatgttgcaaagctgaaactctatacccattaaacaactgcctgttcctccctcctccaacccctggcaatcacctttttttttttgagatgaagtctcactctgtcacccaggctagagtgcggtggctcgatctcggctcactgcaagctccgcctcccgggttcatgccattctcctgcctcagtctcccaagcagctgggactacaggtgcccgtcaccacgcctggctaattttttgtatttttagtagagatggagtttcatcgtgttagccaggctgatctcaaactcctggcctcaagtgatccacccgcctcggcctcccaaagtgctgggactacaggcgtgagccactgtgcctggccaggaagtagactcttgatattagttctctctggttgaaatgtttttaaaaatgaaagagaatgactaataacaaaaacacagaaagttataaggattgatgaagatgtggagactttgaaacccatgtataccattggtgggaatgtgaaacgacgcagccctgtggaaaatggtacagcagttacctgaggtcaggagtttgaaaccaacctggccaacatgcagaaaccccgtctccattaaatgtacaaaaattagccaggcatggtggtgcgcacctgtaatcccagctactcgggaggctgaggcaggagaattgcttgaacccaggaggcggaggttgcagtgagccgagatcgtgccactgcactcagcctgggcaacaaagcaagactctgtctcaaaaaaaaaaagtctacttcccaaccttcccaaaaatttatctaaaccccgtgacaaaactttaacttgtgtttccgaccccaggcttggctgttctggacatttacttcccaaaggctgtgttctctcagcccctctgcctggtttctttcaggaggaacaaaacccaggcacagaattcaccaacaagaacatgctgatgacagtcatttatttgctgtttgctgggacgatgacggtcagcaccacggtcggctataccctcctgctcctgatgaaataccctcatgtccaaagtaagagccttttccacttgccaggccttgggaacagaagtcagggttctaggctgagcaaggtggctcacgcctataatcccagcactttgggaggctgaggcgggctgatcacttgagaataggagtttaagaccagcctggccaacacagtgaaaccccatctctactgaaaatacaaaaattagcgggtgtggtggcatgcacttgtaatcccagcactcaggtggctgaggagtgagaattgtttgagcccaggaggtagaagttgcagtgagctgacatcacaccactgcactccagcctgggcgacagagcgagacactgtttcaaaaaaaaaaaagtgagaattctagagggaagagtgggtgggccaagcagacaggctgagttagatctttgaggcatcgatgggcatggcgtttgagatgtcgaggagccagaagaggttcaggagttgctgattgcagtatgaggcacagtgaaaaacaaggcaggtgtctgtgggcctcatcgccttagtgatacattaggtgccttatcctgagccatggggagcaatgcaatgactttgagcaggggagggcaaggtcaaattggttttttatttttattttttttactttttgtgggggatagactctcactctgttgcccaggctggagtgcagtagtgcgatctcggcccactgcaacctccggcctcctgggttcaagcaattctcctgcctcagcctcccaagtagctaggattacaagcatgcaccaccacgcccagctaacttttgtatgtttagtagagacagggtttccccatgttggccaggctggtcccgaactcctgacctcaagtgatctgcccacctcagccttgcaaagtgctgggattacaggcatgagccaaggcacccagcccaactctagcattttcgggtcaggcagctgctgtgggccatggggacgggctgacctggaatatgggagtggaggtcctggtagtgttgcaggagtggaattagctgtgacttccagcagtgacttgggttctctgagtctgtttcctcacctaggaaatggggatggataacaatatgtacctcacaagggtgctatgggaattaagaaagtatggatgagccaggcatggtggcttatacctgtaatcccagcactttgggaggctgaggtgggaggatcacttgaggctaggagttcaagatcagcctgggcagcataatgaggccctgtctctaccgaaaatagaaaaattagctgggtgtggtggtgcgtgcctgtggtcatagctactcaggagactgaggtggaaggatcacctgagcccaggaggtgagatgaaggctattacagtgagccgtcattgtactactgcaccagcctgggcaacagagtaagaccctgtctcaaaaaaaaaagagagagagagaaggccaggtacggtggctcacatctgtaatcccagcactttgggaggccaaggcaggtggatcacctgaggtcaggagttcgagaccagcctcgctaacatggtgaaaccctgtctctattgaaaatacaaaaatgagctgggcatgatggcaggcgtctgtagtcccagctactcgggaggctgaggtgggagaatctcctgaacccgggaggcggagttgcagcaagccaggatcgcgccactgcactccagcctgggtggcagagcgtgtaatcccagctactcaggaggctgaggcgggagaatcgcttgaatccgggaggcagaggttgtggtgagccaagatcgcaccattgcactccagcctgggcaacaagagcaaaactccgttgcaaaaaaaaataataataataaaatgaaataaaataaaataaaataagagagagagaagatagatggaacacccaacacacaagatgtgtggtctttgggctcagtgagggctgggggaccactcctccccacctgtcagcctcaccccaaactacagctatgcaagcagatgggcttctgagaggaggatccctgggccctacccccgtctgactcctgccctcctcttgcttgcagagtgggtacgtgaggagctgaatcgggagctgggggctggccaggcaccaagcctaggggaccgtacccgcctcccttacaccgacgcggttctgcatgaggcgcagcggctgctggcgctggtgcccatgggaataccccgcaccctcatgcggaccacccgcttccgagggtacaccctgccccaggtgggtatgcgtatggctgccacccatggttctctgcctcggggcctgagcccgggtggtttgctgtcagtgtctccctgactttttcttgatcttagtgtctctctctctctctctctgtctttatctccctctctttctctgtctctgtcttcctcctccactcctacccccctgcatctttcttctccttctttctctgacaccccctccctttctgcatatattttttttctttttttgagacagagtctcgcactgtcgcccgggctggagtgcaatggcgtgatctcagctcactgcaacctccgcctcccaggttcaagtgattctcctgcctcagcctcctgagtagctgggattacaggtgcccaccaccacgcccagctaattttttgtatttttagtagacacggggtttcattatgttggtcaggctggtcttgaactcctgacctcgtgatctgcccgcttcggcctcccaaagtgctgggattacaggcgtgagccaccgcacccagccatgctttctgcatcttttaactctttctgtttctttttggtttgtgttttcttcccctttgactctatctctgggccccatctgccccacagatctcccaattctacctccttccaaggtggttgggacaatcgaatgaggtaacatacagagaagcagtttgaaaactgaggagcaagtccaggactaagggaagccctcttgacccttagcccctgctgcagacacattctctcctctgtctctctctctcaatctcagtgcccttcactggagagcagctccgatgcagaaccaaaagggggcgatgtttccccagaaaccccagcagtttatgcaagcagctccctcctccaccttcactgcagaatcaaacctatggcagttaggatccagtgctgctatgctgctattttctttttcttcttcttctttttttttttttttttttttccgagatggagtctcgctctgttgcccaggctggagtgcactggcgtgatctcggctcactgcaacctccgcctcccaggttcaagcaattctcttgcctcagcctcctgggtagctgggattacaggtgtatgccaccacacccggctaatttttgtctttttagtagagatgggttttcaccatgttggtcaggctggtctcaaactcctgacctcatgaactgcctgcctcggcctcctaaagtgctgggattacaggcgtgagccactgcacctggcctaccccctcctgttttgtagatggggccttgggcaaatcacttccccccctgaacctcaatatatccctcctctacattagaaacaataatagtatcaacttgaagctgtaagataatgcttgtaaaacaaacaccaactcaactcttgggaaccggtcctgtgtaccaggcagcaacaatttaatgatgataatgacaggtatccaggcttgaggacctgctctgcaccaggggttattctgagtgctttgcatatctattatctcatttaatctttaaagcaaccctataccattatcatgcccatcttacagataaggaaactgagagcttgaaaagtttttagaggatttgccaaggtcccccagcctgcaaatagtagattcaagatttgaactcagagactatgccttaactactattctttgcctttctttctttctttttttctttctttctttctttctttctttctttctttctttctctctctctctttctttctctctttctttctttctttctctctctctctctttctttcttttctttttctttctctctctctctctttcttcctttcttccttcctcccttcctcccttcctcccttcctgtcttcctctctttctctctttctttcttgacagggtctctctttgtctcccaggctggggtgcagtggtacaagcatagctcacagcagccttgaactcctaggctcaagtgatcctcccacgtcagcctcctgagcagctgggacaacgggctcataccaccatgcctggctaattttttaatttttcctagagacaaggtcttgttatattgcccaggctggtctcaaactcctgggctcaaatgcttctctcacctcagcctcccacgtggctgggattacaggcatgagccactgcacgccactcaacactccacaaatgttgatgccattaggttttgtgaactagtgtccctggcacccgagacttgtactccacactcgaggaccaaatggactggggtgggaaggggtttatagtttcattattatttcccctcagggcacggaggtcttccccctccttggctccatcctgcatgaccccaacatcttcaagcacccagaagagttcaacccagaccgtttcctggatgcagatggacggttcaggaagcatgaggcgttcctgcccttctccttaggtatctgctgcagccctgggtatcacaagcaggtgctggcgaactccaggcatctgtgccagctgggggcacccttctgcaccctgggcttactgttggctcctccacctgctgttccccccgtgggcctgggtgtgaggaatactgactcagccctctctctctctctctcctcaccagggaagcgtgtctgccttggagagggcctggcaaaagcggagctcttcctcttcttcaccaccatcctacaagccttctccctggagagcccgtgcccgccggacaccctgagcctcaagcccaccgtcagtggccttttcaacattcccccagccttccagctgcaagtccgtcccactgaccttcactccaccacgcagaccagatgaaggaaggcaacttggaagtggtgggtgcccaggacggtgcctccagcctcaacagtgggcatggacagggttaatgtctccagagtgtacactgcaggcagccacatttacacgcctgcagttgttttccggagtctgtcccacggcccacacgctcacttgactcatgctgctaagatgcacaaccgcacacccatacacaactacaagggccacaaagcaactgctgggttagctttccacagacataaatatagtccatctgcaatcacaagcacatagccaggtaacccaccaactcccctggatctgcagcccacacgtgggagtctggctgtcaccttcacaagccacagaaacggccacacatgttcacagctcacacgccctctccattcatcgaacttctcagtgtccctgtccctggtgcctggcacagggaacagcatgccccctccggggtcatgccacccagagactgtcgctgtctatggccccaactcatgctccctctcttggctacaccactctcccagcctgtgaccaccgatgtccacacacccccaaccacttgtccacacagctacccacgtacgacatcgtcctggctccccagagtatcttcccactgagacacgccgcccccacagaggcacagtccccagccacctctgcaactgcagccctcagtcacccctttttaagcaccctgattctaccaaatgcaaacacatctgggtctgcgattatgcacagagactttggacatacgaggaccctcagaccggaggaacacctgcccaaccccaacacgtgcttatgtaaccacgtggaaagcggcccctgctgcccctccacacacacatacacactcactgatctacagcccctgttcggcgtcagagtccccactagacccagtggaaggggttagagaccaagtaggggccagtttccaattcaccctgtcagggagtgagccggatctgacgttccttgtgacttaagggtccggcttgggaattaaagtttgtttctggcctttagcctactgcgtgtgtgacccgtgtcagtcactgtgagtaaggggtggggacaggggagtccacccctcccctgaggctgggcgggagctgaaaaacatggccaccgcccaccctggctgttgacatcaggaccagatgtggagctgggaggaggggcagggctggtgacgccctgggcctcatttccaaaaagggccaaggtgtccggcggtgggaagtgggcaaggagggggtaacccaagctggactgtggaccttgggggcttcctcagccagggagagcctgaagccaactagatccagaccctagagactcttcaaacttgagtacaggaactagcttgcaacacagactctaagcccactcccatttcttccaccctttttctcttgcctccccttcacaaggaaaccagaggcatttgtaaatttcctttctttttttttttttttttttttttgagacggagtctcactctgtcacccaggctggagtgcagtggtgtgatcttggctcactgcagcctccgcctccgggttcaagccattctcctgcctcagcctcccaagtagctgggattacaggtgtgtgccaccacgcccagctaatttttgtatttttagtagagatggggtttcaccatgttggccaggctggtctcgaactcctgacctcagatgatctgccagtctcggcctcccaaaatgctgggattacaggcgtgagtcgctactagataaatttcttatctagcaaagaagtttgcaaacatacgcaaaagtagaaagatacaatgagcccccaggtgcccatcacccagcctcatttcaatagtcatcaactttctgcagcttttacttcatctatatccttttctgcctctttttttttttttttattttgagatagggttttgctttgttgcccaagctggggtgcagtagcatgatctcatagttcactgtggcttcagactcctaggctcaagtgatcctcccgcctcggcctccaagcagctgggactacagatgcgtgccaccacacccagctaaatttcttatttttattttctatagagaaagtctcactatacagcctgtgctggtctcaaattccaggcctcaagagtttccatcccagcctcccaaagtgctgggattataggcgtgagtcactgcaccctgccctgatatttttattttatctattgctttttatttacttatttatcttttatttttgagacagagtctcactctgttgcccatgctggagtgcagtggcatcatctcggctcactgtaacctccgcctcttaggttcaagcagttctcctgccttgacctcccgagtagctggaattacaggtgcctgccaccaagcctggctaatttttttatttgtagtagagatggggttttgccatgttgaccaggctggtctcgaactcctgacctcaggtgatctgcccaccttggcctcccaaagtgctgagattactggtatgagccaccgtgcctggccacctattgctttttaaagattatttttttattattattatttttttatttgagatggagtttcgctattgttgcccaggctggagtgcaatggcgtgatctcagctcaccgcaacctccgcctcccaggttcaagcgattctcctgcctcagcatccctagtagctgggattacaggcatgcaccaccatgtccagctaattttgtatttttagtagagacgaggtttctccaggttggtcaggctggtctcaaactcccaacctcaggtgatccgcccatctcggcctcccaaagtgctgggattacaggtgtgagccaccgcgcctggccttaaagattattttaaggcaaattacagaaagcaatttaatgcacatttctgagagttaaagatatttttgcccttgacattttatgaggacagttttcaaacatgcagcaaagttgagggaattgtacaaggaacaccttgtgcacttcctgggttctcccactagcactttgctacactgctttctgacgtttctacacacctgaccaccagctcaggatttatttatttatctatttattttgagacagagttttgctcttgttgcccagactggagtgcaatggtgtgatctcggctcacggcaacctccacctcctgggttcaagtgattcttctgcctcagcctcccaaatagccgggattacaggcatgcgccaccacgcgtggctaatttttgtgtttttagtagagacgggatttctccatattggtcaagctggcctcaaactcccgacctcatgtgatctgcctgcctctgcctcccaaagtgctgggactacaggtgtgagccactgcgcctggccaattttttttttttttagacgaagtctcactctgtcacccaacctggagtgcagtggcatgatcttggctcactgcagcctccacctcccaggttcaagcgattctcctgcctcagcctcctgagtaactgggattaccagcgagcgcctggttaatttttgtttttttagtacagatggggtttcatcgtgttggccaggtgtgagccaccatgcccagaccagttcaggactttttaggcatttccgagtaaacgcacgtatcagttcatcaaaaaacttaagcaatgcatatatcattagcgaaagcttcttttttaaaaaaaaaaatccaagatgttaacactttattggcttaagttctatagagatagcacaaaacagagaataatagagaactgaaagatgagattggaatcagatcctaactttgccacctcctagctggtcacaccttgactgaggctttaccatcttaaagccttaataaattgataagatgtaagaaatgtgggccaggcacagtggctcacacctgtaacccttgttgagggaccgaggtgggaggattgcttgagcccaagggttcaagaccagcctggccaaaagggcaagactctgattcaagggaaaaaaaaaaaatccagaaagaaatgtgaaaactttcagaacttcgtaggaaataaatatctgctaagttcttcttggatttaatattattactattttttatatgtcggtgcactttgaaaaggaatgaagtttaaggttttcttcttttaaaagtaaggcaatggggccaggtgcggtggctcacgcctttaatcccagcactttggggaggctgaggcaggcagatcacttgaggtcaggagttcgagagcagcctggacaacatggtgaaacgcggtctttaccaaagatacaaaaactagccaggcatgatggcaggcacctgtaatcccagctactcaggaggctgagacaggagaattgcttgaacccagcaggcagaggttgcagtgagccaggactgtgccacagcactccagcctgggtgacagagtaagactccatctcaaaaaaataaaaaattaaattaaggcaatgatttgcattcctttgcagtcaaaattcacattcagggaaatctggaatcaggtagaaatacaagcagacctatttatttaaagaggtgggctatagccgggcatggtggcgggcacctgtagtcccagctacttaggaggctgaggcaggagaatggtgtgaacccgggaggcagagcttgcagtgagccgagatcacaccactgcactccagcctaagcgacagagtgagactctgcctcaaaaaaaaaatttttttttttaaataataaaaaaaataataaagaggcgggctgggcacggtggctcacgcctgtaatcccagcactttgggaggctgaggtgggcggatcacgaggtcaggagatcgagaccatcctggttaacatggtgaaaccccgtctctactaaaaatacaaaaaagtagccaggcgtggtggtgggcgcctgtagtcccagctactgaggcaggagagtggtgtgaacccgggaggcagagcttgcagtgagctgagatagtgccactgcactccagcctgggcgacaaggcaagactctgtctcaaaaataaataaataaataaatacataaatacataaataaataaataaagaggcatgtcggcctgggcatggtggcttatacctataatcttagcactttggtaggctgaggtaggagaatcgcttgagcctaggagcttgagaccagcctggacaatatagtgagaccccatctgtacaaaaaagaaaacaaacaaacaaacaaaggcacagactttgcactgtatcaatataaaagttgacatcaggatgatttcagtagcaagtaaaaaaatacagaaactcaaaatggcttaaacaataaagaagaattattggtccccaaagtaaaaatggaatcggtgtggtcttcaaatagttttctgcgtgtgttaaaatatacacataataatattattttaaccatttagaagtatacaatttagtagcattaaatatattcgcaatgggccaggcgtggtggctcacgcctgtaatcccatcactttgggaggccgagacaggcggatcacctgaggtagggagttcgagaccagcctgaccaacatagagaaaccccctctctactaaaaatacaaaattagtcgagcgtgggggtacatgcctgtaatcccagctactcaggaggctcaggcaggagaattgcttgaacccggcaggtggaggttgcagtgagcaacctgcactccagcctgggcaacaagagtgaaactctgtctcaaaaaaaaaacaaaaaaaatattcacaatgttgtataaccatcacaactatttgtgcccaaaatgtttccattgtttccaacaaaaactacccattaaataataactctggctgggcgtggtggctcacacctgtaatctcagcactttgtgagtccaaggcaggcggatctcttaagcccaagagttcaagaccagcctgggcaacatagggaaacgctatctctacaaaaagtgagactggtgtggtggtgcacacttgtagtcccagttactcaggaggctgaggtgggaggatcacctgagcctgggaggacaaggctgcagtgggctttgatcacaccactgcaccccagcctgggtgacagagtgagcccatctcaaacaacaacaacaaaaaacacaataactccccattaaagtttattttttaaaagtcaaaactacaatactcattttcacacctatcacaacgaacaattctgttattcattcattgtattcatagtgattcatagtgttcacattttcacatttctctgatagtctcataaatgtcctttttttttttttttgagatggagtctcgctctgttgcccaggctggagtgtagtggcatgatctcggctcactgcaacctccgcctccggggttcaagtgattctcctgccttagcctcccgagctcccaagtagctgagactaccagtgtgcgccaccacacctggctaatttttgtatttttagtagagatggagtttcaccacgttggtcaggctggcctggaactcctgatctgctaatttgcctgccttggcctcccaacatgctgggattacaggtgtgagccactgcacctggcctgtcctttaaaaaaaaaaaaaaaaaaagataggctggagtgcagtggcacaatctctgctcactgcaacctctgcttcccaggctcaagtgatcctctcgtctcagcctcctgagtagctgcgattataggcacacaccaccacacctggctaatttaaaaaaaaatttttttttttttgtagagatgggatttcattatgtttcacaggctggcctcaaactcttgggctcaagcaatcctctctccttggcctcccaaagtgctggaatattaatgtcttttaaaattggtttgttcaaatcagaatctgaattttgtttgaaatgtctattaagtttttaaaatctgtaactgttacccatccttttacatgccattaatttcttgaatcaactgggtctttggccctgtgcaatttttcacattctggattaggctggcagcatctttgtggtgctgttcaagatgtccttctgttcccaggatctcctgtaaactgggaattagatcagattcaggctcattctggcaagagatcctccctggaggtgctgggccacatcttgttgcatcacattgcaaaattgatggtcccatgtgtagtgacgcttaaaattaacgtgtccaggtcctgatccctctgttagaaactctgccaaccagccaggtgcacagtgactcacgcctgtaatcccagcactttggaaggccgagacgggaggatctcttgagcctaggagtgcaaaaccagcccagataacaaagtgagacactgtctctacgaaaaacttaaaaaattagccagttattgtggcacacacctgtggtcccagctacttgggaggctgaagtgggaggatcacttgagcctaggaggtcgaggctgcagtgagctgtgttcatgccactgcactccagcctgggcaacagaggaagaacgtatcaacctttcacttgccttagcagagggatcctttaaaactagatcagatggtatcactcctgttcatatcatagttaaaacaaagaccaaagtttttgccaggccaaggcttgccctcaccccaagcccaccttccctctactcctgcccccaactgttccagccacaaacaggcctcctcacagttcttcacatgcctgccacacgcctgcctctgggcctttgcactggctattccctccacctggaatgctgttccccacagggctcacttgctaatttacttcagatctcaatcatagcctgagagaagccttcccccatcatcctctctaaaacagcacccacacctctcactatcccctgctttcttttcctttttctttttttgtttttgtttgtttgtttgtttgtttgttttttgagatggagttttgctctgtcgcccaggttggagtgcaatgaagcgatcttggctcaaagcaacctcctccattggggttcaagtgattctcctgcctcagcctcccaagtagctgggattacaggtgtgtaccaccacacccagataattttgggtttttaaaattttttttttaagacggaatcctgctctgtcacccaggctgtagtgcagtggcgtgatctcggctcacttcctgcaacctctgcctactgcattcaagcaattctcctgcctcagcctcccgagtagctgggactacaggtgcgcaccaccacaccaagataatttttgtatttttagtagagacagggtttcaccatgttggccaggctggtctcaaactcgtgaccttgtgatccgcctgtctcagcctcccaaagtgctgggattacaggcgtgaaccacagtgcctgactaatttttgtatttttagtagagatgggtttcaccatgttggccaggctggtctcaagctcctgacctcaggtgatccgcccacctcggcctcccaaagtgctgggattataggcatgagccactgtgcctggcccttgctttatttttcttcactgcacatcttgcaacatgataagtatttatgtgagtgttatttctcttcccctttgaatggaaactccagtaggatgtggacttgtcttgctcattgtagaaaccccaccccagcaccacctgtccatcttttcttttcttttttttttagagatagggtctcactctgtcatccagactggaatgcattggcaccatcatagcttgttgcagcctcaaactcctgggctcaagcgatcctcctgcctcagtctccccaagtagccaagactatgtgtgcaagaacacctggctaattaaaaaaattttttggaagacacagggtctggctatgttgccaggctggtcttaaacccctagcctcaagcaaccctccaacctgggcctcctaaagtgtgggattataggtgcgacccactgcacccagccccgaatctttttctcttttttggggggggaggggggatggtctctgctgtcacccaggctggagtgcagtggcataatcctggctcactgcaacctccacctcccaggttcaagagattatcctgcctcagcctcccaagtaactgggactacaggtgcacaccaccatgcctggctaattttttttgtatttttagtagagatggggttttaaaatgttggcaaggctagtctcgcgctcctgacctcaaatgatccacccacccgggcctcccaaagtgctgggattacagatgtgagccaccaagcccggcccccgtctcattttttaaaatgcatttcaaagtaaattgcaggcacatagcaggtgctcagcaaatagttcatatagttcatgagtgaatgaattcacaggttcaagtaggccatcaaccagctgggtccactgagccctagggtgggcaggggccccccaacatatctaaacaagtgaacagatctttgcacatatttgcacccctcaaaaatgccacaataggccgagcgtggtggctcacacctgtaatcccagaactttgggaggccgaggcaggcacatcacctgaggtcaggagtttgagaccagcctggccaacatggtgaaaccccatttctactatgaatacaaaaattagccaggcattacggtagttcctgcagtcccagctactcaggaggctgaggcaggagaatctcttgtacctgggagttggagtttgcagtgagcccggattgcgccactgcactccagcctgggtgacagcgagagaccatctccccaaccaaaaagaaaaaaagagatcgggctgggtgcagtggatcacacagtgggtcacgcagtgggtcacgcctataatcccatactttaggaggcccaggtggaatgattggccaggcttacctcgtgatccactcgcctcggcctcccaaagtgctgggattacaggcttgagcagccacgtctggcccctaaaacagttttttaaaattagccaggtgtgcttgcacacatagtcttggctactcggggaggctgaggcaggagggtcacataagcccaggagtttgaggcttcagcaagctatgatggcgccactgcattccagtctggatgacagagcaagaagacagaatgcttgaactgggaagtggagtttgcagtctgctaagatacagccaccgcactccagcctgggcgacagagtgagactctgtctcaagaaaaaaaaaatgccacaataaggaattgtcccctttatggcaggccttttacagggcggtgaagatgcagcagttcccaaaatatacccagtcccttcccccgcagagcccacaggccagtgggaggagacagatgtgagacacataatcatgccaataaatatataatgacaacccaggcaaagtgttgccaaggaaagggacagcatgttgggagtgaacaatatgaggacctagattgggctgggggggccaggcagtgatgcgatggagaagggatgatagagttggggacaaagtgctgcaggaggttgctccaagtcctctgagggggctctttgggtgagaaagcgagagaagcctggggaggcgaggggagggtcacagaaacataaggagtttagggttctgctgaaaggtttggggcagaggtgggaaagggtttggtttgagattgggaagaagccttctgactgttgagtgggagacaggttggaaggagcaacagaagccagcagcccatggccgggcacagtgacccacgcctgtaatcccagccctttgggaggccgaggcgggcagatcacgagttcaggagttccagaccagcctggccaacatggtgaaaccccgtctctaccaaaaatacaaaaattaacctggcatggtggtgcacacctgtaatcccagcaactcaggaagctgaggtgggaggatcacttgaacccaggagatggaggttgcagtgagccgagatcgagccattgcactccagcctgggcaacaaagcaagactgggtctcaaaaaaaaaaaaaaaaaaaaagacacagcccagggagacaacggtgaagggccctaagtggccagtgacaaggagctgggagcttgccctgagggcagcaggaggccatgggcaagcagagaagggacagggtaggatttgactttcagaaacagtcctctggttgctaaatgggagaaaggagtgacagtagaggcaggagaaggcaggatcagacgggggtgctgggaaggggcaggtagaagagacatcaggaggccaaacagataggactttatgatgcaccgtaggtataccagtacccaaacacaggtggccaagagcagagggatagacgcccagcctcctcctcacagacatccaggcatgcagagccctccacgtgccaaacacacagggccgaggaatggaagtgcagcagagccgatacgcaggcagcagatctgcaataaccaggacacacagtcccaccagaaggagagagcagtggaatgatcagggctcactgcagcctcgatctcttggactcaagcgttcctctcactccagcctccctagtagctgggaccacaggcacacgccatgatacctggttaagttttaatttttaaacttcttgtagagatgggggtctcagtgcattgaccagtctggtctcgaactcctgggctcaagcgatcctcccaccttggcctcccaaagtgctgggattacaggagtgagttactgtgcccggccaacaactattcttattcccattttacagatggacaaactgaggctcaggaggccagtcacttgcctgtagcccacagttagtggtagcactgggattccaacttgggtccccttcatgtcgcctgtatttggtgtcccatttaggcgtccatgcaggttttggcgtgtctgaagatctgtgtctccccaagtaagtgtcccccatggatgcccacccagccgtgtcctcctgtctctgaggtttctccaggaatcgagctcctggcctggcttgtctgagtgtgtctgtgggccagtagcatgcccctgcccgtctgggtccctctgcgtgtctctgcttgtcctagcctgtgtgtgtcagtgacgtctaagagtgtgtgtgcgtgcgtgcgtgcgtgcgtgtgtgtgtgtgtgtgtgtgtccttgtccgaggagccgagagagtgagggggaatgaagggccaaggaggcctggctggggctgggctgggggtggaggcggggagaggggcgtcacggcctgagctgagaggggagtggagttctggaggaatgtttaccagacacagagcccagagggacagcgcccagagcccggatagagagacacggcctcactggctcaggacagggggcacagccaccagggtccccttccccctcctcagctccctccctggcccctttaagaaagagctgatcctctcctctcttgagttaacccctgattgtccaggtggcccctgggctctggccctggtgggcggaggcaaagggggagccaggggcggagaaagggttgcccaagtctgggagtgagggaaggaggcaggggtgctgagaaggcggctgctgggcagagccggtggcaagggcctcccctgccgctgtgccaggcaggcagtgccaaatccggggagcctggagctggggggagggccggggacagcccggccctgccccctcccccgctgggagcccaacaacttctgaggaaagtttggcacccatggcgtggcggtgccccaggatgggcagggtcccgctggcctggtgcttggcgctgtgcggctgggcgtgcatggcccccaggggtgagtgatgggggctccttggggcagggatcccctcggaggggctggggcaggggtaggaggtgggggatgatggcaggtgtggggggcctgggctggcttagggagtttccttgggaccacagaaaagggacttcaagggagggagacacagactcagagacaccaagtgcggcagagggagagaaagactgagagaggaactgaagggcaggggggacagaagagaggacccggagagacagacagacaaggagaagctgagggcaggggtgggggctggacctgagaagggggccatggggagaggggctgagctgagggtcgccaggaaggaagaaatctttccgaaggggcaccgagtcaggcagtgggatgaggagggctctggagccctgggggaaaacgcttctccctgccaacaccacccccctgacccgccacttgtccctaccccaccagtccactccatctctggggaggaggctctcactttgtctctctgtctctgcctccagctctgctatctctgtgggtctctgtttctctctctttcacagtctctgcctttatctctccctgctctctgagtctctctctctcttctcagcctccctctgtgactgtatcccccctccgcccccaccttttcttctctcttgagggctgtttcttcattttttctgtcttgccttgtatctgtgctcctctctgtctcatctcccctgcctttctctggcttctccctccgccaccacccttatctccccccaccaccacccttatctctctcccccaacccctgattcttcccctccatccaccagcaccagcgcgacctgttaagtctctagagacctaagagaggacggagggggcaggggctggccctgccaggcagtgcagggcgtgggaggctgccagatcccgagcctccttcccgacgggatggacgctagatcccagtcccttgggagggctcccgtcctcctctcagagcctccgccctccaccccactctgaggtcactctgcaactatgtcggcctaagggcctggcggggtcctggccgccggtgggcaggcaaggacagggtggaactgagggccggaaggagctggggggttcctaagctaactcttcccatctcccctccaggcacgcaggctgaagaaagtcccttcgtgggcaacccagggaatatcacaggtgcccggggactcacgggcacccttcggtgtcagctccaggttcagggagagccccccgaggtacattggcttcgggatggacagatcctggagctcgcggacagcacccagacccaggtgcccctgggtgaggatgaacaggatgactggatagtggtcagccagctcaggtgtgtggccacatccccgaatcccactcccacctccgtcacacagagggcagaaagcccacctgggtgggaaccccagtttgaccacttgtcagccgtgcggctttgagcatgtgatggaacctctaggtttcgttttcctcttctgcaaaatgagttaataataggacatacttcgtggttgtcatgagcttccagactggacaccctctttccgttctgacagaccccctcccagtgtccagctctgaccctgaacctctctgtctctcctcttgccctgtcagaatcacctccctgcagctttccgacacgggacagtaccagtgtttggtgtttctgggacatcagaccttcgtgtcccagcctggctatgttgggctggagggtgagctctggggtcaggggtcctgaggggtcagaggacatgtggcgctcataggttgtgggaagtcaggaatcctgaggggtcaaggtcaaagggtgctggaggattcaggatgaacctagcgtcatacagcctaagaatgtcagagttttgggtggtcaagaagctgggagtccatataagttatggtgccaaggctgggggattatatgttctgggtgaaaagacttcttgggggtagttggatgtcctaggcatcagacaccatcaggtcacaggaggccattctggtcttcagataaggcgtcagaggcacgcaacgtacccctgtccccacgaccccagcggtctcttttttctcatccatagaatgagatgaggatgagctgtcagacattctggaagagagacatgaggagctcagctatcgtggggggtctgacatgggaggaatcagatattggggtcacgtgtgtgttgggtatggctcaggtgccctcggggatcagataaggcaagtcaatgaccctgcagggtgggtttgctgcccaaagcctacagcatcctagtggtgagtcaggcatcttggggcctcagagggaccccagcctctaccactgcccaccccgctaggcttgccttacttcctggaggagcccgaagacaggactgtggccgccaacacccccttcaacctgagctgccaagctcagggacccccagagcccgtggacctactctggctccaggatgctgtccccctggccacggctccaggtcacggcccccagcgcagcctgcatgttccaggtgagtccggggatgtgggtcagctccgaatagggggccgggcagggctgaagtcaggagcaagggaacattgctacctctgcgtgagtgtctgactgtccttctgtccctcactgtctgtctctctcgtttctccctctgagtctgtctctgcctctctgtctctacctatcttatttctctccgtatgcctttttctgtctctttctgtctcttggtgtgtgtgtctttctgtctctctttgtatgtgtctctctctctgtctctctgcttctctctccctccattcaccccggcctctctctgaatagaattctttgtcctgggtttcctctgagctgttccatggctcgagtgcgtgtgggcctggtgcccctttgtcagcccttgacccaagcagggcaccggaatcaaccgtgccctcctctcctccgcctccctccacaaccggcccacctcctgccctaacaagcctgctggcctcagtcaaagggaggatgtccagcccggtccccactggggagatggaacccaaagaagagagagcaggaagaaagtaggagacagaggctgggcgtggtggctcacgcctgtaatcccagcactttgggaggctgaggcgggcggatcacgaggtcaggagatcaagaccatcctggctaacacggtgaaaccccatctctactaaaaatacaaaaaattagccgggcgtggtggcgggcgcctgtagtcccagctactcgggaggctgaggcaggagaatggcaggaacccgagaggcggagcttgcagtgagccgagattgcgccactgcactccagcctgggcgacagggcgagactccatctcaaaagaaaaaaaaaaaaaaagaaagtgggagacagagagagatagaatgacatacactggaagggacaggccacagtgacccaagatgaacatagacaggacagagaggccgggcatggtggctcacgcctgtaatcccagcactttgggaggctgaggcaggtggatcacttgaggctgggagttcgagaccagcctggccaacatgacaaaactccatctttaccaaaaatacaaaaattagccaggcgtggtgacgggcatctgtagtcccagctacttgggaggctgaggcaggagaatcgcttgaacccgggagatggaggttgcagtgagccgagatcacaccactgcactccagcctgggtgacagagcaagactctgtctcaaaacgaaaaacaaaacaaaatgaaagacaggacagggaagttggagtgacagaaaccctctccttcttggggaccattcccttctgcaccatgcagacgaggaaggaccgagctcagggttatgcagtggtcaggggcatcactgggggaccctggattcagggggttctccctactgaaggaggaaagacagaggagcagatggcagaggctctgtaaaggaaggaggctgcagcctggagggcatcagcttcccgcactcccaacctgctgcctctctctgctggaatgaggaggggccttctgactgggggtctccagggtggagggaggagctcacattctcagcattcctgggaccctgagttgcaaggaagacctggtgagcatgctgaccccagaggagtgactcaggcccatggctcgagtggctgagtagggaccagggttggggatcgggcatgagtcagcctggcaggtcccatgagaaggggaggggagggagagaaatgggggctgcacaggtgtgaggatctgtgcatgtctgtgtggtggtggtggggtgtctggatatctgtgtgttctggatctgagtgttagtgtatccgtcagcacaacctctgtgtgagggtgtgccttggcgagggtggacttctgtggatgtcccatgtgtggtgtgtgtgtgtgtgtgtgtgactaaatatatttccttcagcttggattctgtcccaatatgtgtttggatctttatagcatgtctctctctctacgtttcttaggggttgcccgtgtgtgggtgtctgtgtgtgtgcgcatgatggagtgtaccagtgtcagcctgtgtctgtccctcttttttgtgtttgtgtgttcacagctgggactcactgtatgaaagtaaagtgtgcctggagggtagtgggtttggggctatggtgcacacctctctgtatggaggtggtagtgtcagcccacaggtgtgcagctatgggtgtgagagtgtcctagtgagagcttgtgttcccttgcagaatcagaacgtgtccatggataacttgtgtttcttaccaccttttttcccccttattttttttcaagataagctcccgctgtgtaacccaggctggagtgcagtactgtgatcatggctcactgtagcctccacctcctgggctcaagcaatcctcctacctcagcaccctcccacccctcaagcagctgggactataggcatgtgccaccatacccagatagtttttgaattttttggtagagacagagtctcgccatgttgcccaggctgctcttgaactcctggcctcaagtgatcctcccgcctcggcctcccaaagtgttgggatttacaggcgtgagccactgctctcaaccctcagcctcttaccagctttctgtgtgtgtccatagatgtctctgtggcgtgtgtgtatatgtcacagggtaagcatgttggtgtatgactgtagtcacagacctgtgtgtgtgtgtgtgtgtgtaacagcaccctctgcttctctctggtctccctgtgtgtgcactggcccctgctgcctctgagtacatgacctaaggatgcttaccagtcagcgtatagatgtgtctctgtgtcaatctatgtgtccatggcagtgtctccatccttgtgtgtctgcatcaggcctgcgcatctacgaaactgtgtttttttgttttttggggtttttgttttgagacggagtctcactctgtcacccaagctggagtgcagtggcacgatcttggcttactgtaacttccgcctccggggttcaagggattctcctgcctcagcctcctgaggagctgcgattacaggcacgcctggcttatttttgtatttttagtaaagacagggtttcatgacaggtttgtcatgttggccaggctggtctcaaactcctgacctcaagtgatccaccggcctcggcctcccaaagtactgggattacaggcgtgagccaccgcacccagcgcaaatgtgtttttgtatcagtctgtgtctgggtgaacatgaaacctgggcgcatccagctccatcttatggcgtagatggaggcttggctgtgaggtgtacgcgtcggtgtgtctgtgtctgagcaggtcaaaatgacccttcattgtgtcctggtgtgtatctatctgtccacctcaactccatgtacgctgttacgtggtgtgtgtctctgaatatacagggacatttaagtttctgtgtgtgttggcatcagcctagatgtacattgcgtcgctaggtgtttgtaatcaatgtgtacatgtgtgactgtgtgtttatgtgtttgtcccacgttggcttgtatgcatacatgtctctttatgaatgtacatcagtgtcagcccgcgtgtatatgtgtgagtcacggtgtttttgtgtcactgtgtttgtgacatcagcccttgcatatctgtgtgccgttaacttaccaagcgctgcgtcttctgtgctaataacagcccctgtgtgtttaagtgtgattcattgtgagtgtgtgtgtgggggggtttgctgtgtgaaggaatttcgtccgtttgtgtgcgtctgtccctctatctgactcagggcgtgcccctcctccttccatccctctcattctctggaaaagctggggcggagagcaggggttgtggggggatggtcaggacatctggaaagcacatctggaatcggcctgctcctgtcgtcttgcggtaaagcaagaaccttctggaggggaaggggtcccagttcctcctgtccccttcactcaaggtgcggccgttggggcctgggaagggggatcccggctctggctccgcgcccccgaagccggccggaagcgctggggtggggaggtgcccccggtgactcacgcgggggcaggaatgctgcggtcggaacgggacccggctccagaacccacctccagccccagggcttctccggccggcggcgccagctcccgcgcgctgaccctggcggggccccacgtgccaggtggctggacccgacccaggctccccgcccccactcgggccgcccgcccgggactgtactgtttctcctccgggcggcgcgggggctgcgggcgcggggccttcagggcgcggaggctgcgggagcgggcacctgaccttgtctgggaacggccacctaggaagccgcgactgaggagctcccctaccctcccctttccggcctctgcagactttgcaccattccactccctccgctgacggagaaaaggaaactttgtgtctgcggatggagagcctcccttgccaacgcggtgggaacagaggcgtacacgcacggagcaaacacgagagacacgtacacagatactcaacacatgcacgtacacaccatccacagatacacgcagggtcacaaacataccagctcagaaacacaaacacagatgcacaagcacacgcgtaaacaacacgcagaactgcagtcgcacttacaagacttggtcccagggccgggcaccgagtggctctgcctgcgatccagcactttgggaggccgaggcgggaggatcgcttggggccagaagtttgagagcagcctgggcaacgtggtgagactctcctcttctctacaaaaaaaaattgaaaagttagccaagtgtggtggccgcctgtagtcccagctgcttgggaggatgagacaggaggatcgcttgagccctggaggtcaaggcagcagtgagccgtgattgtgccactgtactgcagcctgggagatagagcaagaacctgtctcaaaaaacaaaacgaaaaacttggtccttcttacatcctagcgcagacattgtgtgtgtgtgctgggggaggggggtgtctatgtttctacgtgtatctgtgttgggggattccccttattcaccaggatacgttctctaagagcccccacaaaagcctgaaacaatgaataatactaaaccctgtatatactacacataactttctttttccttcacaatttcgcagatagattgttttcttactatagatcttagcaacctcagtacatatatatatgattatctttttctaagtggagaattttcaccttttcacttaaaaggaagcactttaaggcttctctttggcctatccgaattgcagccatcactattttgcaccctggggccttttttttttttttttagacagagtctctctctgtcgcccaggctggagtgcagtgtggcgaccttggctcactgcaacctccgcagcccgggttctagcagttatcgtgcctcagcctcccgagtagctgggattacaggcacgcgccaccatgcccggctgatttttttgtatttttagtagagacgggggtttcactgtgttgcccaggcttgtcttaaactcctaatctcaagtgatccacccgcctcggcctcccaaagtgctgggattacagatgtgagccatagcacccggccaggcgattatttagataaataagagtttcttgaactctgcacttgagcactgcagtaccaggacagttgatctgatagctaagtgacttacagacaggtatcagatacagcactgagatgctggacaaaggggggattcacgttctaggccaaccagagtgggatggcatgaggtttcatcacagtactcagaacggcatgcaatttaaaacttaggagttatatctggaattttccattgaaatatttttagaccaagtgtaactgaaacctcaaaaagtgaaacctcggataaagggggactgatgtacgttgtatagcggtttgtgttgggtatctctgtgtgcttgcaggtctgtgtctctcgtgtttgtctctgtaattgtacgtgcttctgtgtgtgcacgctggtcataccaacaccaacaccaccacgttagggagggaaggcaatccaccttcactcgaaaacagttactcaaggccgggcacggtggctcacacctgtgatcccagcactttgggaggctgagatgggcagatcacttgaggtcaggagttcgagaccagcctggccaacatggtgaaaccctatctctactaaaaattacaaaaattagccgggcatggtggcgcgctcctgtaatcccagctactcagaaggctgaggcaggagaatggcttgaacccaggaggcagaggttgcagtgagccaagatcatgccactgcactttagcctgggcaacagagcaagactctcaaaaaacaaaagaaaaaaacagtcaagacacaatacgtgaactcccctatggaattacacatgctcatatttctacacctatgcccaggaatgctcataagtacatagctgaacacaatttcactcactcattcaacaagcatttatggcacacctattgtgtgccaggccatcctgacacagcaggggacgaaacagacacaacccctgccctcctagagctgacattctagtgggagaaactgacaatgggcaaggtacttgggtaacaggtaaagtatgttgggtgatgagaagaaccaaagaggaaaagtaaagcgggaaggggatagatttggagaggaagctccaattagctccaattttattgtattttttctttctttctttgtcttttcttttctttcttttttttttgagacagagtttcactcttgttgcccaggctggagtgcaatggcgtgatctcagctcactgcagcctctgcctcccgggttcaagctattctcctgcctcagcctcctgagtagctgggattaaaggggcctgccactatgcccagctaattttttgtatttttagtagagacgaggtttcactatgttggccaggctggtctcgaacttcggacctcaggtgatccacccacctcggcctcctaaggctgggattacgggcatgaaccaccgtgcccagcctttatttttcattttattatttttagtttttttgagacagggtctcactctgtcacccaggttggagtgcagtggtgtgatcacagctcactgcagcctccacctccccgggcacaggtagtcctcccacctcagcctcccaagtagctgggactacaggtgtgcaccaccacacccagctaatttttctcttttttgtagagatggggtctcaccacgttgcccaggctggtctctaactcctggcctcaagcgatcctcctgactcagcctcccaaagtgctgggattacagtcatgagtcactatgcctggccaagctccaatattaacagggtggccaggcctagcggactgagaggtgttgttgaggaacaaaaatgaaagaagagggtgcgagtcatgtagacatttgtggaagactgttttgagcacagggaacagtgcacagttcttggagtggaaacatgcttcatgtatgtgttccagagacactggaggccagtgtggccggagaagagcgtgtgacagggagagtgggagaggggttggtaggaggcgagcttagagatgaacagacatgtctccattgatgtacagccatgggccagtttccctaagtgtgtctagcaggtgtgtgtgctcatacttgtgtccttgtgagttagtgagggtgcctgtgtttgtgcatgtgagtgtgtgcatgtttgtgtgtctccttgtgtgtgtgtgtctgtgtatgcttttgtgtgtctatgtgtgagtatgtatatatgtgtctatgtccatatatatgagcacgtgtatttctgtgtgtgtctatatatgtgtatatgagtatgtgagtatctaggtgtacgaatctgtgtgtgtgagacacagtgtgtgtgtgtggctgtgtctgtttctgtgtctgtgtctgtgtctgtgtgtgagcatatgtgtttatatgtgtgtgtatgagtatgtgtctctggggtgtaagaatgtgtgtgtgtgcctgtgtgtgactgtgtgtgagtctgtgtgagcatgtgtgtgtatgagtatgtatctctctctggggtgtaagaatgtgtgtgtgtgtgtgtatgcgcctgtgcctgtgtgtgtgtctgagcatatgtgtctatgtgtgtgtatgagtgtgtgtctctatctggggtgtaagagtgagtgtgcctgtgactgtgtgtggttgtgtgtcttcatgtgtgtttgtgtatgtgtgtttttgtgtgtgtatgcctgtgcctgtgtgtggctgtgtgtctttgtgtgtgtctgtgtctgtgtgtctgtgtgtatgagtgtgtgtgcctgtgcctgtgtgtggctgtgtgtgtctttgtgtgtttctgtgtgagtatgtgtgtctatgtgtgtgtatgagtgtgtctgtctctggggtgtaagaatgtgtgtgtgagacagtgtgtgtgcctgtgcctgtgcctgtgtgtgtctgtgtgtgtctgtactatgtgtgtctgtgtggcgggaggttagggctgaaaccaagccatccttgtgtttggggatggaggctgtgttcctaactcattgccctcaactctgctaaccctcccttcaggcaagtgcctgtgtgggctgcactgcccctggtcaggcaggccatggtaggagtggcccggcatggccccggagcccttcctgcccctctctgatattggacccttccctcatatgactccctagggctgaacaagacatcctctttctcctgcgaagcccataacgccaagggggtcaccacatcccgcacagccaccatcacaggtgacagagttgggaggtggggagctgggcgtcagagggtggggtttgggtccggggtcagagtgggggcagagagcagggtagggagctttgagcaaaggctccccagggtcaatctctcccgtttgtccacagtgctcccccagcagccccgtaacctccacctggtctcccgccaacccacggagctggaggtggcttggactccaggcctgagcggcatctaccccctgacccactgcaccctgcaggtgagactcccaaacttggttcatttcagtctcaggcctccttccacccacatccacaacccccatcctctccctgggaacccaccacttctcggccactgttgagaagcagtagagcctggggggttaagccagatgtcctgggttcgaatcctagctccaccaccttctggctgtgtgaccttgggtaggtggcttaatctgtccggggctcagctctcttgtctacaaaatggacataatggtagtgcctacctggtatgcttagtgtgaaaattcaatgagtgaatgcaaattaccaacttaaaatggtatatagaacataggaaacaaatttaacaaaattggccaggcgcggtggctcacacctgtaatcccagcactttgggaggccgaggtgggcggatcacttgaggtcaggagttcgagaccagcctggccaacatagtgaaaccacatttctactaaaaatacaaaaattaactgggcctggtgggacgcacttgtagtcccagctactggggaggctgaggcaggagaattgcttgaacctgggaggcggaggttgcagtgagccaagatcgtgccactgctctccagcctgggtgacagagcgagactctgtctcaaaaaaaaaaaagaaacaacaacaaaaaaaatttaacaaaatgaaaatgatcagctgttttaattattttcagtattagtgatgttaactctagccagagtgggagccctgagacagcagagtctggagccatttctgtcaccactggatacccagaaccctccacttctcccatcccagccctggccactctgtgtggtcactgtctggggatgggtctgtcccctactggaatgtgagctctgacagggcagggctggagctgtcccagtcaccactggctcctcattcttgcccagcacaggaccagacatagagtagggaatattcgctagaaggatatattacaacccagatgagctagacccagcctctgccctcaagttgctcctagaataagaaaaccaaaaccaggccaggtgtggtggcttacacctgtaaccccagcactttgggaggccaaggctggtggatcacctgaggtcaggagttcgagaccagcctggctaacatggtgaaaccccatttctactaaaaatacaaaaaattagccgggtgtggtggcacacacctgtaatcccagctactcaggaggctgaggcaggagaatcccttgaaccctggaggcagaggttgcagtgagccgagatcgtgccattgcactccagcttgggtaacacgagcgaacttccgtctcaagaaaaaaaaaaaaagaaagaaagaaagaagaaaaccaaaaccaaaacaaaactcacagatctgtaaatataaggcctaattctggtctgaagttctctgagattagaaagttggagatggggggtggacagtgcctatgatggtagatgacagtaatgaagaatgaccaatttctactgagtgtccgctgtgcaccgggtcttgcattaacgcacacctgctcgtgtgtttgtgaaggagggtctatggatacacccattttccagatgaagaaactaaggctcagagtggttaaccagattgtccaaggtcacatcaaacccatgtcatgctcctaacctccttagaaactgttttttgttttttcttttcttttttttttgagacagagtctcgctctgttacccagactggagtgctgtggcgtgatcacggcttattgcaacctccgcctcctaggttcaagcaattctcttgcctcagcctcctgagtagctggtattacaggcgcccaccaccacgcccagctaatttttgtatttttagtagagacagggtttcaccatgttggtcaggctggtctcgaactcttgacctcaagtgacccgcccacctcggcctcccaaagtgctgggattacaggcgtgaggcaccgcgctgggccctgagaaaatgtttagagtcagtgcttgattaaacaggaattgtcttatacttacatgctctgagcacaaccccatctgcttgtcgttttaaacctagaaaatagtggctattggctgggcatgatagctcacgcctgtaatcccagcacttcggggggctgaggcaggtctgtacaaaaaattcaaaaaaattagctcagtgtggtggcacacacctgtagtcccagatactcgggaggctgaagtgggacaatcacctgagcctggcagtcaaggctacagtgaggcaggattgaacctctgctctccagcttgggtgacagagtaagactctgtctgagaaaaaaaaaaacaaaaaacagtggctattaatcttcccgttttcaaggtgaggaactgaggcccagagaggggccccctctctgggcctcagttcctcccatcctcctcccctccccggggctagaaagccgaagctgagattcaatcccagaggccagctggatttgggagacctcaaatgccaggtcaggcataagttgcactctacccacatcaccaagtgtccccaggaaagcagaagtgtgtcctcttccctttccaggtctcacttcctgctgcacatgggctagggctgaagagttccagtgggagggtcacagccgtcccagggaaaagagaagtgggagcaggcatggggagaccaactgtctgtacccatctcctctctgtcctggtagaggttcctcttcctgtctgtcactgcaggtcagagagcaggcatggtgacagcctcaccccctcctcgtacccaccatctgcccccactcctccccaggtctcatggtggtgtcatctccctccatgggggctgtgtgactttgggcaagttgctgaacctctctgggccttggcttccctgtctgtaaaatggggatgagaaaagaaattgaccccatagggtggtagtgcgaagtcaatgagttcatccagtaatgtgcttgacagagagcttggtacatatttggcactcaagaaatatttgctaggccgggtgccatggctcacacctgtaatactagacctttgggaggccgaggcaggtggatcgcttgagcccaggagtttgagacctgcctggccaacatggtgaaacgccatctctccaaataattaaaaaattaggtggggctgtcattacaccactgcactccagcttgtgtgacagagtgagaccctgcctaaaaaaaagaaaaaagaaaaagaaagaaagaaagaaaacaaacgttagctgttgataattataatgtgcaaagcagtttatatgcatcatgtcattaaaccttataccctgacaagtaagaactgtgatgcccattttccagagacagaaactgagactcagagaagttaagacactcactctaggtcacacagcaaacaacatccaacacaggacttagatccaaggaatctggctttagagcccacaccctgtggcagtaaactccttcctgacatactgtgtggctgtatggctggagtctccagggtgaaggggaagcccttggctgcaccattcctgaggcgtggctgtgaattgtgtggttatgggggttttgtggttccatgtggcagggctatacagatgtgtacaccagtggtggccccctccactctgagtgtgccattcctcgggtggaataggtatgggaacctgtgccgctatgcagagcttgacacttgttgccaggaaacacacataaaataataagtgacaggccgggcacggtggctcgtgcctgtgatcccagcactttgggaggctgagcgggcagatcacctgaggtagggagtttgagaccagcctgaccaacatggagtaaccctgtctctactaaaaatacagaattagccgggtgtggtggtgcatgcctgtaatcctagctactcaggaggttgaggcaagagaatcacttgaacctgggaggcggaggttgcagtgagccgagatcatgccattgtactccagcctgggcaacaagagcgaaactccatctcaaataaataaataaataaatagatagatagatagatagatagatagatagatagatagataataaatgacagtatgcacaagcagtcttctaaatgcttacatgccccaattcagtcaaccctgtgaagtggggagccactgtcatcccattttacaggtgagaagactgaggcacacagctagggaatgatagagcctggatttgagccccagatccagcatccgtgctcctcagcactaggctaaactgcctctgtgcacagacaagaggtattgttaccattactgatattcttaccgccagtagagcaaagactctggggacaggatggggtttaggtcccagcttcatcagtgacaaactgatgaccttgaacaagtgattccgtctctctgggcctcagtgttgtcatctgtacagtgggaataagcataatgcttaccacaggacaacaggattgatgtgagggccaaatgaattcagatttgtcaagggctaagaaaggcactcagtacatgttggacgtgttttatctttttttattaagataatatataacatagtcaggtgaggtggctcacgcctgtaatcccagcactttgggaggccgaggcaggtggattacctgaggtcaggagtttgagaccagcctgggcaacatggtgaaaccctttctctacacagaataaaaaaaaagccgggtgtggtagctcacacctgtaatcccagcactttgggaggccgaggggggcggatcacttgagatcaggagttcaagaccagcctgaccaacatgatgaaacctcgtctctactaaaaatacaaaaaagttagccaggcatggtggcacatgactgtagccccagctactcgagaggctgaagcagaagaattacttgagcccaggaggcggaggttgcagtgagccgagattgtaccactgcactccaacctgagtgacagagcaagactctgtctaaaaaaaaaaaaaaaaaaaaattagtcaagcatggttgctcacgcctgtaatcccatctacttgggaggccgaggcatgagaattgcctgaacctgggaggcggagattgcagtgagccgaaatcacgccactgcactccagctcaggtgatgaaatgagactcataggccgggcacggtggctcacacctgtaatcccagcactttgagaggctgaggcgggcggattgcctgaggtcaagagtttgagaccagcctgactaacatggtgaaacgctgtctctactgaaaatacggcaattagtcgggcgtggtggtacgcgtagtcccagctacttgggaggctgaggcagaagaattgcttgaacctaggagacggaggttgcagtgagccaagatctcaccactgcactatagcctgggcgacagagcaagactccctctccaaaaaaaggaaaaaaaaaaaaaaagaaaaagaaatgagatgtataacatgcataatcttcagtgtacctctagatcaagctcgtctaacacatgtggcccaggatggctttgaatgcggcccaacataagttcgtaaactttcttaaaacattatgagatttgtttgtgatttttttttttaacgcatcagctatcgttagtgttagcgtattttatgtgtggcccaagacaattcttcttccactgtggtccaagaaagtcaaaagattggacacctttgagattgtttaacacacatattcaccatgtaaccaccatccaaatcaagacacagacccttccagtccccaagaagtctccctcaggccccagagatggccacccttctgcttctagaacattgcttttgcctgtagtataatgtcatataaatggggcctcacagtatcgtgctattattatgatgatcattactattatttgagacagagtcttgctctgttacccaggctggagtgcagtggtgtgatcttagctcactgtaacctctgcctcccaggttcaagtggttctcctatcgcagcctcccgagtagctgggattacaggcgagcgccaccacatccagctaattttttacatttttggaagagatggggtttcaccacgttggccaggctggtcttgaactcctaacctcaagtgatcgcccaccttggcctcccaaagtgctgggattacaggcgggagccaccgtgcccagtctatttgcgttattattgtcatcacactattattatcggtgctgaccacccgccatgcactgtggcatcctttgggcataactacacttaatctttaaacaatcctgtaaggcacttgatcctctaaggccccgtgtgcccaaggaaaaaactgaggctcagagagggaagagtcttgccagaggtggcttttggaagtggtgacagaaccacattgtatacagccaaatgatctccttgctttgcaaatccaggtgcccgtgttatcctagcatggcactgcaacacacacgcacccttgaaaagttgtgtagtcacaccagaccaccaccactgggagctgtgtgaccatctcgtgtgattgcttggctgtcccgtcctcacacccttgcctctcctcaggctgtgctgtcagacgatgggatgggcatccaggcgggagaaccagaccccccagaggagcccctcacctcgcaagcatccgtgcccccccatcagcttcggctaggcagcctccatcctcacaccccttatcacatccgcgtggcatgcaccagcagccagggcccctcatcctggacccactggcttcctgtggagacgccggagggaggtaagaagggttggggagggacacgtcaccactgccccaccggaccttgcttatatcagtgccacccccattgtcccctttcactcctttacccctcatggcctcaatctccttcccatccaatctctgacccctcagcagcactgcccgctggcctctctcccagcccttctctcccctgtgcttcctctcatgggaggcctgcacgagttgcccacgtgtgtgcccttggcaccctgcacccacttcctgggaacaggggagggggtcaggaagaggtgggggtgccagcttcccctcttccctgtcctccagtgcccctgggcccccctgagaacattagtgctacgcggaatgggagccaggccttcgtgcattggcaagagccccgggcgcccctgcagggtaccctgttagggtaccggctggcgtatcaaggccaggacaccccagaggtgggtgctgctggtgggattggagtggagtggcttggggaggagggaggagaacatatcagggcagacatagatggttgtgaaggttgggtagtacacaattgctctatgcctagggggcacattcagggaaggttcacattcacattctggggagaataagggggtctaagggagggcatggggaatggctgtttttgaaccactgcaaaagcatttcagcagactcatatttactatataacgattttacagcagatagttatatagcaccttggggaaggggtaccttttcctgattttcacaaaggcactcctatcagggctagcaataccctgacatagggagggaggatggaaagggaagctagaaggggatggagggatacaggttaaaggatgaggatgagagatgaaggggaggacgaggaaggatgaggagttggaggatggggagagcgttttgagaaagagatggggcattgagcccgagagtgaaggcttaacagctggggggtaaggttctaccctgatgccacttctggacctcctaggtgctaatggacatagggctaaggcaagaggtgaccctggagctgcagggggacgggtctgtgtccaatctgacagtgtgtgtggcagcctacactgctgctggggatggaccctggagcctcccagtacccctggaggcctggcgcccaggtaagtccaaagccatgcccaacctgcttcaaccctgtctctccctgacagccctgacttactccttgtacctttcagtgttaccgcaacttaggccctgttcctaccctgagccttactgagagctgccctcactcccttacccatgccaacccctcactcccttacctgtgccacggcctcactcctttacccgtgccacaccctcactcccttacccgtgccacaccctcactcccttacccgtgccaaaccttcactcccttactcgtgccacaccctcactcccttacccgtgccacacccttactcccttacccgtgccacgccagtcttgtcctctctgagcacatctcctctctgtcctttcttctcacagggcaagcacagccagtccaccagctgggtaagggcttccacaccccatctcctccttccctaccctcaacacctagtgggggcactgtcaccatgcatactcattgcacatccctttcatgtttctctaactcatcactctaacctacttcttgagtttgtgtggtccttgatggaggtgcctataatggcctagcatagcacattgtaggtattcaggcaatgacagatgagtgggtggatggatgaacaaatagatggatggatggatggatagatatatggagggtggatgggtgggtgggtcaatggatgaatagaggatggataggcgggtgaacagataaatgactggatgtcgagtggataaatggatgggtagatggatgggtggatggatggatgggtggatatatggagaatggatgggtgtgtgggccaatggatgaatagagggtggataggtgggtgaacagataaatgactggatggtgagtggataaatggatgggtagatggatgggtggatggatgggtgggtggatatatggagggtggatggatggatggttggatatatggagggtggatgggtgggtgggtcaatggattaatagatgggtggataggtggatgaacaaaagatgactgggtggtgagtggatatatggatgggtagatgggtggatggatggatggatggatggatgaatggatggttggataaatggatggatggacagatggatggatttgtgagtggatgaatggatgggtagaaaggtggatggatggatgaatgaggtatcctcctcacatccatccctctcaaatatttctctaacaattctcaaacattcctcctacacccattgtcccctctgggcactattatggttcactcttgtaactcaacccactagccttcaatactcctcacatcccttcctacatttcttcacatacgctttccacgcttattccaccctcctttcacatatatcccattataatccgttcctcccacatgaccccaaaggcccattgcacaacacacttctcattcacaaactctgcacaccttgtatgcacttaccataccttccacattgcaaacactgaaaaacattgtccacaactttcccacacccgattctccttgcatgcttactgcacactccatagacatcattccctcacccttcactaatcccaacccatctcactctgcacactcaccctgaaccccttgcatactcagcacataatgatctttatttcttacacactccattccacccctgccctttttacaccccctttctgtgcaccccatacttctcatctgcccttctaacatcttttgcatgctcactgcacacttctctcacactgcaattacatccttaaaattccttgctcactccttgtatctaagacttcacgaatactcttcccacttcacacacccccaacttttccagcagccatccaaccctgtatatgcttaccatgcccctttggatatttatttcaccctcattcctggctttatggaaaccattgtggccgggtgcaatggctcacgcctgtaatcccagtactttgggaggcctgagacaggtggatcacctgaggtcaggagttcaagaccagcctggccaacattggcgaaaacccatctctactaaaaatacaaaaattagctgggcctggtggtgcgagcctgtaatcccagctgctcgggaggctgaggcacaagaattgcttgaacctgggaggcggaggttacagtgagccaagatcatgccactatactccagcctgggcaacacagcaagactctgtctcaaaaaaaaaaaaaaaagaaagaaagaaagaaaaaaagaaagaaaagaaaaagaaaagaaaaaaaaattagccaggtggcacagacctgcagtcccagctactcaggagacatggtgaaaccctgtctctaccaaaaaaagaatacaaaaattagctgggcatggtggtgcacacctgtaatcccagctacttagaagctgaggcaggagatttgcttgaaactgggaggcagaggttgcaatgagctgagaccgggccactgcactccagcctgggtgaaagagtgagaccctgtctcaaaaaacaaacaaacaaaaaaagagacaaagaaaacccttttgtagtcattgcattctcttcaaaagatgttccttagtccgccctccttgcacacgcttcatgcaccatcctacactgcaaggatcttcttccccactcacctgcttatctacactctagtccacccttcttgcacaatcatcacatttctcacactaacctatgctgcttgagatttctccacacccatctcatgttcatctagccctcttggcacactcataacgcgttccacacatctctccctcccattccacactcactgcacactcctcaaatatccattccactcttctgtttttttggatcttggtggcataatatttggtagcttaaagtaaggaaaactgcaaacgcccaaacagagacttgaaccctgaaccctcaggttaaaagtctgatgctctaccacctgaactatcctggcactctcttttttttttttttttttttttttttgagatggagtcttgctctgtcacccaggatggagtgcagtggcccagtctcggctcactgaaacctccacctcccaggttcaagcaattctcctgcctcagctcccgagtagctgggattgcaggtgtgcaccaccaccccagctaatttttgtatatattttgtttaagtagagacagggtttcatcatgtcggccgggctggtcttgaactccttgcctcaagtaacccacccgccttggcctcccaaagtgctgggataacaggcatgagccaccacacctggcctccatcccactcttaactcacccatcctacaactttcacacacttctgctttaacctgcacttgtatcacatccattgcatgccctgtccagcccagcccattcagatatgtgaatgcatccatcacacacctcatcaagtatgtgcacatctttgccgaggccttctgcctccctcccacatcacccctttgggtcccagagagctggatccaaggcttcatccatgacctgttcctcataccccctgatagtgaaggaaccttcaactcctgccttctcgtggccctggtggtatgtactgctaggagcagtcgtggccgctgcctgtgtcctcatcttggctctcttccttgtccaccggcgaaagaaggagacccgttatgggtgagttggaaccacatggggaggctgtgtggcctgggatggagaggctggaggcagggaggccagtgaggaggctggtgcaggaggagtgatgactaagaatcagaatgagggcaagggaagccaggcgtggtggctcacgcctgtaatcccagcactttgggaggctgaagcaggtggatcacttgaggtcaggagtttgagaccagcctggccaacatggcgaaaccctgtctctactgaaaaatgcaaaaattagcgggaagtgtaggcacacgcctgtggtcccagctacttgggaggctgaggcacgataatcacttgaacccgggagatggaggctacagtgagctgagatcgcatcactgcactccagcctgggtgacagagtgagatcctgttttcaaaaaaaagaatgagggcaagggggtgtgtggaatgaatggaaggcagaaggtagctgcccaaggcatgctcagcaaatgttagcacagagggcaggcagggcttgaggctgagatggtgcttgctcaactgctggttgagtagggggttccacatggtttttccctgccctcacctactccccctcccccccagagaagtgtttgaaccaacagtggaaagaggtgaactggtagtcaggtaccgcgtgcgcaagtcctacagtcgtcggaccactgaagctacctgtaagtgaaccctatgccccactgccctggcctggatctaaaggctgtagagaatctggcctgctgggcttctgtacatgtgtgagccaaaagtttctaaaggccttgggatactagaatgtcagaaccacagaccctagaaataacagatttgtggaaccacaaagaactttcaaggaatagaatcttagacacagtaaatcttagaaacaccaaggctgggtgtggtggctcatgcctgtaatcctagcgcttcggggggccgaggtgggaggatcacttgagcccaggagttcgagaacagcctgggcagcatggtgaaaccctgtctctacaaaaaaaaaaaattagccaggtatggtggtgtgcccctgtactccctgctactcgggaggctgaggtaggaggatcacctgagcccagggaggtcaaggctgcagtaagccgtgatcacaccactgcactccagcctgggtgacagagcaagaccctgtctcaaaaaagaaaaaaaaataaaagaaagaaaagaaacaccaaacctcagagccattggatcttagaagatgtaatgatgatgataatgatgaagataatgacaagaagaaaatgatgatgatgatgaaataatgttgagattagatggtgatgatgtgataaaaatcacaggcaaccctagcactacctatgtggcaggctctgttctaagcattctacatgtatctcctcgtttaaccctcagagcaacccaaggacacgggtttcttttttctttttttttctttttttttttgagacagagtctcgctctgttgcccaggctggagcacagtggcacaatctcagctcactgcaaccttcacctcccaggttcaagtgattcttatgcctcggcctcccgaatagctgggattacaagtgcatggcaccacatctggctaatttttgcatttttagtaaagatggggttttactaaccctgtctttgttagccaggctggtcttggaactcctggcctcaagtgatcaacctgccttggcctcccaaagtgctgggataacaggcgtgagccaccacgcccagccagaggtgggtttcttatcaccttcacttcacagatgaggaagctgtggcatagagtggttaagtcacttgcccaaggccacacagcttgtaaattggatagctgggatttgaacccaggtacttttgctctgaagtctatactattttttttttttttttgatagaatcttgctctgtcacccaggatggagtgcagtggcttgatcttggctcactgcaacctccgcctcctggattcaagcgactctcctgcttcagcctctcaagtagctgggactacaggcacatgccacaacgcctggctaatttttgtagttttaatagagacaaggtttcaccatattggccaggctggtctcgacctcctgaacccgtgcctcccaaagtgctgggattacaggtgtgagccaccacgcctggcctgaagtctatactctgaactgccacactctactacctcttggaattataaattggtagagagatagaatcgatcttggcctgaaaaattatatgcatgtactctacacccttatacttttgaaatcataaaatcttagaactatagactctccattagaaggctggaaagccatgcaaggtctcagccgaggaggggatctcagaggcccagtcaaatctgttctttcggctgggtgcagtggctcacgcctgtaatctcaacactttgggaggcccaggcgggcagacacttgaggtcaggagttcgagaccagcctggccaacatggcgagaccctgtctctactaaaaatacaaaaattagccagatgtaatctgtaatcccagctacttgggaggctgaggcaggagaatctcttgaacctgggaggcggaggttgcagtgagccgagatcgtgccactgcacttcagcctgggtgatagagcaagacaccgtctcaaaaaaaaaaaaaaaaaaaaggaatctcatctttccagttagggaaactgaaatccagaaagaaaatggaagagctaggtctcttcctagcatacagcgagaaagccgccagggccccagggggatgtttggaaagggctgggaaagacatttatttaagaagagaaggaagaagcaacgatgtcccagtgatttaactgagtaacatacagcatccattctcagggtgtgagcctggtcccctgtggtccctgagacctttgcagggggcccataaggtcaaatctattttcatactattaccaagacattatttgcccttttgctttctcattctctcattagcattcagcgcagttttccagaggctccctgacgtgggatgatgtcatccaacactctgacagctgatggaccttgtgcttgtatattcttgttttaaaaatttatcaggctgggcatagtggcacatgcctgtaatcccaccactttgggaggccaaggtgggcaaattgcttgaggtcaggagtttgagaccagcctgaccaacatggtgaaaccccatttctactaaaatacaaaaattagctgggtgtggtggtgcatgcctgtaatcctagctacttgggaggctgaggaaagagaatcgcttgaacccgggaggcggatgttgcagcaagctgaggttgtaccactggacttcagcctgggcaacagagtgagactgtctcaaaaaaaaaaaaaattaaataaacctgataggttttcttttgaggccaggagtttgaaaccagtgtgggcaacatggcaaaaccccatctctatttaaaaaaaaaaaaagaaacacaaaaatttgccaggtgtggtggtgtacacctataattccagctgctcaggagggtgaggcaggggaatcacttgaacctgggaggcggaagttgcagtgagctgagattatgctactgcactctagcctaggcaacagagcgagactcggtttcaaaaaaaatttttttatttttttagagatggggtctggctatgttgcccaggctgatctccaactccaggcctcaactggtcctccttccttggcctcccaagttgctgggtgaaccactgtgaaccactgtgcccagctagttttatttttgaatacagaaatattgatatatatgtaacataaacaaaagctctttctagtcctcaataattctaacaatgtaaaggtgtcctgatgtcaatttgtttgagaatgattatataacaaagaaaatggataaattacaattacactcaacaactaaattaaaactatttcatagacatcatgttgagtgaaagaagccagacacaaaagagaatatactatgtgattccatttttataatatttcaaaactaatcgattgtaacagaaatcaagaaagtggctaccccaggagggcaggtcatgttctgttcttggcctgagtgctagttacacatttgtgtttgatttgtgaaaatccactgagttggccaggcgtggtggctcacgcttgtaatcccaacactttgggaggccaaggtgggcagatcacctgaggtcgggagttccagaccagcctgaccaacatggagaaaccccgtctctactaaaaatacaaaattagctgggcgtagtggcacatgcctgtacttgggaggctgaggcaggagaatcgcttgaacctgagaggcggaggttgcggtgagccgagattgcgccatcgcactccagcctgggcaacaggaacgaaactccatctcaaaaaaaaaaagaaaagaaaatccactgagttgcttacttatgatttgtgcagattatacttcaataaaaagaaatatttttgtgtgtgtgttttgtttgagatggggtcttgctctgtcacccaggctggggtgcagtggcatgagctcagcttactgcagcctccacccctgggctcaagtgatcctccaacctcagcctcctgagtagctgggactataggcgcgtaccaccacacatggctagcttttgtatttttttgtagagacggggattcgccatgttgcccaggctggttttgaattcctggactcaagtgatccaccggcctctgcctcccaaagtgctgcgattacaggcatgagccactgcatccagcaaaaagaaatatttttattttattttattttattttattttattttattttatttttgagacggagtcttgccctgtcacccaggctggagtgaagtggtgcgatctcagctcattgcaacctctgtctcttgggttcaagtgattttcctgcctcagcctccccagtagctgggactacaggcatgtgccaccacacacggctaatttttgtatttttttgtagagacagagattcgccatgttgcccaggctggtcttgaactcctggactcaagtgatccacctgcctctgcctcccagagtgctgggattacaggcgtaagccactgtgcccagcaaaagaaatatttttaacaactggtacagcagggcactgacccatcagggtgcccactggagcaagagcgtggccaggctttaccccttgagttccctttgagggaaggttcagggggtccagaggaggagctggggtggaagtagaggggtgctcagggcagttgctaattttaaatcagtgcagaagtatgtcagtgtttcaacaatggatctatccctactggtgggtgaatgtcacctgaatgtcagccctgctccatgactctgtccaccccaaccttgcatgcagtgaacagcctgggcatcagtgaagagctgaaggagaagctgcgggatgtgatggtggaccggcacaaggtggccctggggaagactctgggagagggtgagtcccccggcagcatacacacatccttctgaacttctgagatcctgcacttccacactcccacccaactataggaaatacagtccccacgggccctctgaggtcagtgtctccctctggccccccacaggagagtttggagctgtgatggaaggccagctcaaccaggacgactccatcctcaaggtggctgtgaagacgatgaagagtgagttacgtgcacatgtgtaggacccccagctccttccctatgcccctgagacagaagagagcaagcaagttagccatagcttagaacttctggtgtttccagataggcaatggagcccctgccaggtacctcaatagaaggaattgaatatggggagattagtacaaaggtgggagacgggttgaaggaacaactgggggcagggagggaaaccagagatgagcagcagcaggaagtcacttcccccgctaggcctgaagggtagagggagcaagtggtgttaccagaatccacagctagggacaccaggcaggagctggtatcacagagttagaggctgctctgtgggagctaaaaacccagaatagcactttgggaggccgaggcagcagatcgcttgagtccaggagtttgagaccagcctaggcaatatggtgaaaccacatgtctatgaaaaaaaaaataataatagtaacaaaaaattagctgggcatggtggcacacgcctgtagtcccagctacttgggacactgaggtgggagaatcacttgagtctgtgcggcagaggttgcagtcagctatgatcatgccactgcactccaatctgggtgaca
